United States Patent Application Publication US 2026/0337271 A1, published October 29, 2026 (application 19/549,689).

The application's sequence listing, which the Patent Office published only in electronic form, follows.

SEQUENCE LISTING (3900 sequences)

SEQ ID NO: 1 - protein, 119 aa, synthetic construct
QVQLQQSGPELVKPGTSVKISCKASGYSFTTYYIHWVKQRPGQGLEWIGWFFPGSGNIKYNEKFKGKATLTADTSSSTAYMQLSSLTSEESAVYFCAGSYYSYDVLDYWGHGTTLTVSS

SEQ ID NO: 2 - protein, 107 aa, synthetic construct
DILMTQSQKFMSTSLGDRVSVSCKASQNVGINVVWHQQKPGQSPKALIYSSSHRYSGVPDRFTGSGSGTDFTLTINNVQSEDLAEYFCQQFKSYPLTFGAGTKLELK

SEQ ID NO: 3 - protein, 10 aa, synthetic construct
GYSFTTYYIH

SEQ ID NO: 4 - protein, 17 aa, synthetic construct
WFFPGSGNIKYNEKFKG

SEQ ID NO: 5 - protein, 10 aa, synthetic construct
SYYSYDVLDY

SEQ ID NO: 6 - protein, 11 aa, synthetic construct
KASQNVGINVV

SEQ ID NO: 7 - protein, 7 aa, synthetic construct
SSSHRYS

SEQ ID NO: 8 - protein, 9 aa, synthetic construct
QQFKSYPLT

SEQ ID NO: 9 - protein, 119 aa, synthetic construct
QVQLVQSGAEVKKPGSSVKVSCKASGYSFTTYYIHWVRQAPGQGLEWMGWFFPGSGNIKYNEKFKGRVTITADTSTSTAYMELSSLRSEDTAVYYCAGSYYSYDVLDYWGQGTTVTVSS

SEQ ID NO: 10 - protein, 107 aa, synthetic construct
DIQMTQSPSFLSASVGDRVTITCKASQNVGINVVWHQQKPGKAPKALIYSSSHRYSGVPSRFSGSGSGTEFTLTISSLQPEDFATYFCQQFKSYPLTFGQGTKLEIK

SEQ ID NO: 11 - protein, 107 aa, synthetic construct
DIQMTQSPSSLSASVGDRVTITCKASQNVGINVVWHQQKPGKVPKALIYSSSHRYSGVPSRFSGSGSGTDFTLTISSLQPEDVATYFCQQFKSYPLTFGQGTKLEIK

SEQ ID NO: 12 - DNA, 357 bp, synthetic construct
  source 1..357: mol_type = other DNA
caggtgcagctggttcagtctggcgccgaagtgaagaaacctggctcctccgtgaaggtgtcctgcaaggcttccggctactccttcaccacctactacatccactgggtccgacaggcccctggacaaggattggaatggatgggctggttcttccccggctccggcaacatcaagtacaacgagaagttcaagggccgcgtgaccatcaccgccgacacctctacctctaccgcctacatggaactgtccagcctgagatctgaggacaccgccgtgtactactgcgccggctcctactactcttacgacgtgctggattactggggccagggcaccacagtgacagtgtcctct

SEQ ID NO: 13 - DNA, 321 bp, synthetic construct
  source 1..321: mol_type = other DNA
gacatccagatgacccagtctccatccttcctgtccgcctctgtgggcgacagagtgaccatcacatgcaaggcctctcagaacgtgggcatcaacgtcgtgtggcaccagcagaagcctggcaaggctcctaaggctctgatctactcctccagccaccggtactctggcgtgccctctagattttccggctctggctctggcaccgagtttaccctgacaatctccagcctgcagcctgaggacttcgccacctacttttgccagcagttcaagagctaccctctgacctttggccagggcaccaagctggaaatcaag

SEQ ID NO: 14 - DNA, 321 bp, synthetic construct
  source 1..321: mol_type = other DNA
gacatccagatgacccagtctccatcctctctgtccgcctctgtgggcgacagagtgaccatcacatgcaaggcctctcagaacgtgggcatcaacgtcgtgtggcaccagcagaaacctggcaaggtgcccaaggctctgatctactcctccagccacagatactccggcgtgccctctagattctccggctctggctctggcaccgactttaccctgacaatctccagcctgcagcctgaggacgtggccacctacttttgccagcagttcaagagctaccctctgacctttggccagggcaccaagctggaaatcaag

SEQ ID NO: 15 - protein, 117 aa, synthetic construct
DVQLVESGGGLVQPGGSRKLSCAASGFTFSNFGMHWVRQAPDKGLEWVAYISSGSSTIYYADTLKGRFTISRDNPKNTLFLQMTSLRSEDTAMYYCARRGEGAMDYWGQGTSVTVSS

SEQ ID NO: 16 - protein, 106 aa, synthetic construct
ENVLTQSPAIMSASLGEKVTMSCRASSSVNYIYWYQQKSDASPKLWIYYTSNLAPGVPTRFSGSGSGNSYSLTISSMEGEDAATYYCQQFTSSPFTFGSGTKLEIK

SEQ ID NO: 17 - protein, 10 aa, synthetic construct
GFTFSNFGMH

SEQ ID NO: 18 - protein, 17 aa, synthetic construct
YISSGSSTIYYADTLKG

SEQ ID NO: 19 - protein, 8 aa, synthetic construct
RGEGAMDY

SEQ ID NO: 20 - protein, 10 aa, synthetic construct
RASSSVNYIY

SEQ ID NO: 21 - protein, 7 aa, synthetic construct
YTSNLAP

SEQ ID NO: 22 - protein, 9 aa, synthetic construct
QQFTSSPFT

SEQ ID NO: 23 - protein, 117 aa, synthetic construct
QVQLVESGGGVVQPGRSLRLSCAASGFTFSNFGMHWVRQAPGKGLEWVAYISSGSSTIYYADTLKGRFTISRDNSKNTLYLQMNSLRAEDTAVYYCARRGEGAMDYWGQGTTVTVSS

SEQ ID NO: 24 - protein, 117 aa, synthetic construct
EVQLVESGGGLVQPGGSLRLSCAASGFTFSWFGMHWVRQAPGKGLEWVSYISSGSSTIYYADTLKGRFTISRDNAKNSLYLQMNSLRAEDTAVYYCARRGEGAMDYWGQGTTVTVSS

SEQ ID NO: 25 - protein, 117 aa, synthetic construct
EVQLVESGGGLVQPGGSLRLSCAASGFTFSNFGMHWVRQAPGKGLEWVSYISSGSSTIYYADTLKGRFTISRDNSKNTLYLQMNSLRAEDTAVYYCARRGEGAMDYWGQGTTVTVSS

SEQ ID NO: 26 - protein, 106 aa, synthetic construct
DNQLTQSPSFLSASVGDRVTITCRASSSVNYIYWYQQKPGKAPKLLIYYTSNLAPGVPSRFSGSGSGNEYTLTISSLQPEDFATYYCQQFTSSPFTFGQGTKLEIK

SEQ ID NO: 27 - protein, 106 aa, synthetic construct
DNQLTQSPSSLSASVGDRVTITCRASSSVNYIYWYQQKPGKAPKLLIYYTSNLAPGVPSRFSGSGSGNDYTLTISSLQPEDFATYYCQQFTSSPFTFGQGTKLEIK

SEQ ID NO: 28 - protein, 106 aa, synthetic construct
ENVLTQSPATLSVSPGERATLSCRASSSVNYIYWYQQKPGQAPRLLIYYTSNLAPGIPARFSGSGSGNEYTLTISSLQSEDFAVYYCQQFTSSPFTFGQGTKLEIK

SEQ ID NO: 29 - protein, 105 aa, synthetic construct
QNVLTQPPSASGTPGQRVTISCRASSSVNYIYWYQQLPGTAPKLLIYYTSNLAPGVPDRFSGSGSGNSYSLAISGLRSEDEADYYCQQFTSSPFTFGTGTKVTVL

SEQ ID NO: 30 - protein, 105 aa, synthetic construct
SNELTQPPSVSVSPGQTARITCRASSSVNYIYWYQQKSGQAPVLVIYYTSNLAPGIPERFSGSGSGNMYTLTISGAQVEDEADYYCQQFTSSPFTFGTGTKVTVL

SEQ ID NO: 31 - DNA, 351 bp, synthetic construct
  source 1..351: mol_type = other DNA
gaggtgcagctggttgaatctggcggaggattggttcagcctggcggctctctgagactgtcttgtgccgcttctggcttcaccttctccaacttcggcatgcactgggtccgacaggcccctggaaaaggactggaatgggtgtcctacatctcctccggctcctccaccatctactacgctgacaccctgaagggcagattcaccatctctcgggacaacgccaagaactccctgtacctgcagatgaacagcctgagagccgaggacaccgccgtgtactactgtgctagaagaggcgagggcgccatggattattggggccagggaaccacagtgaccgtgtctagc

SEQ ID NO: 32 - DNA, 351 bp, synthetic construct
  source 1..351: mol_type = other DNA
gaggtgcagctggttgaatctggcggaggattggttcagcctggcggctctctgagactgtcttgtgccgcttctggcttcaccttctccaacttcggcatgcactgggtccgacaggcccctggaaaaggactggaatgggtgtcctacatctcctccggctcctccaccatctactacgctgacaccctgaagggcagattcaccatcagccgggacaactccaagaacaccctgtacctgcagatgaactccctgagagccgaggacaccgccgtgtactactgtgctagaagaggcgagggcgccatggattattggggccagggaaccacagtgaccgtgtctagc

SEQ ID NO: 33 - DNA, 351 bp, synthetic construct
  source 1..351: mol_type = other DNA
caggtgcagctggtggaatctggtggcggagttgtgcagcctggcagatccctgagactgtcttgtgccgcctctggcttcaccttctccaacttcggcatgcactgggtccgacaggcccctggaaaaggattggagtgggtcgcctacatctcctccggctcctccaccatctactacgctgacaccctgaagggcagattcaccatcagccgggacaactccaagaacaccctgtacctgcagatgaactccctgagagccgaggacaccgccgtgtactactgtgctagaagaggcgagggcgccatggattattggggccagggaaccacagtgaccgtgtctagc

SEQ ID NO: 34 - DNA, 318 bp, synthetic construct
  source 1..318: mol_type = other DNA
gataaccagctgacccagtctcctagcttcctgtctgcctctgtgggcgacagagtgacaattacctgccgggcctcctcctccgtgaactacatctactggtatcagcagaagcccggcaaggcccctaagctgctgatctactacacctccaatctggcccctggcgtgccctctagattttccggatctggctccggcaacgagtataccctgacaatctccagcctgcagcctgaggacttcgccacctactactgccagcagttcacctcctctccattcacctttggccagggcaccaagctggaaatcaaa

SEQ ID NO: 35 - DNA, 317 bp, synthetic construct
  source 1..317: mol_type = other DNA
ataaccagctgacccagtctccttccagcctgtctgcttctgtgggcgacagagtgacaattacctgccgggcctcctcctccgtgaactacatctactggtatcagcagaagcccggcaaggcccctaagctgctgatctactacacctccaatctggcccctggcgtgccctctagattttccggatctggctccggcaacgactataccctgacaatctccagcctgcagcctgaggacttcgccacctactactgccagcagttcacctcctctccattcacctttggccagggcaccaagctggaaatcaaa

SEQ ID NO: 36 - DNA, 318 bp, synthetic construct
  source 1..318: mol_type = other DNA
gagaatgtgctgacccagtctcctgccacactgtctgttagccctggcgagagagctaccctgagctgcagagcctcttcctccgtgaactacatctactggtatcagcagaagcccggccaggctcctagactgctgatctactacacctccaatctggcccctggcatccctgccagattttccggatctggctccggcaacgagtataccctgaccatctccagcctgcagtccgaggactttgctgtgtactattgccagcagttcacaagcagccctttcacctttggccagggcaccaagctggaaatcaaa

SEQ ID NO: 37 - DNA, 315 bp, synthetic construct
  source 1..315: mol_type = other DNA
cagaatgtgctgacccaacctccttccgcctctggcacacctggacagagagtgacaatctcctgccgggcctcctcctccgtgaactacatctactggtatcagcagctgcccggcaccgctcctaaactgctgatctactacacctccaatctggcccctggcgtgcccgatagattttccggatctggctccggcaactcctacagcctggctatctctggcctgagatctgaggacgaggccgactactactgccagcagttcacctcctctccattcacctttggcaccggcaccaaagtgacagttctt

SEQ ID NO: 38 - DNA, 315 bp, synthetic construct
  source 1..315: mol_type = other DNA
tctaatgagctgacccagcctccttccgtgtccgtgtctcctggacagaccgccagaattacctgccgggcctcctcctccgtgaactacatctactggtatcagcagaagtccggccaggctcctgtgctcgtgatctactacacctccaatctggcccctggcatccctgagagattctccggatctggctccggcaacatgtacaccctgaccatctctggcgcccaggtggaagatgaggccgactactactgccagcagttcacctcctctccattcacctttggcaccggcaccaaagtgacagttctt

SEQ ID NO: 39 - protein, 107 aa, synthetic construct [sequence omitted]

SEQ ID NO: 40 - protein, 326 aa, synthetic construct
ASTKGPSVFPLAPCSRSTSESTAALGCLVKDYFPEPVTVSWNSGALTSGVHTFPAVLQSSGLYSLSSVVTVPSSSLGTKTYTCNVDHKPSNTKVDKRVESKYGPPCPPCPAPEFLGGPSVFLFPPKPKDTLMISRTPEVTCVVVDVSQEDPEVQFNWYVDGVEVHNAKTKPREEQFNSTYRVVSVLTVLHQDWLNGKEYKCKVSNKGLPSSIEKTISKAKGQPREPQVYTLPPSQEEMTKNQVSLTCLVKGFYPSDIAVEWESNGQPENNYKTTPPVLDSDGSFFLYSRLTVDKSRWQEGNVFSCSVMHEALHNHYTQKSLSLSLG

SEQ ID NO: 41 - protein, 330 aa, synthetic construct
ASTKGPSVFPLAPSSKSTSGGTAALGCLVKDYFPEPVTVSWNSGALTSGVHTFPAVLQSSGLYSLSSVVTVPSSSLGTQTYICNVNHKPSNTKVDKRVEPKSCDKTHTCPPCPAPELLGGPSVFLFPPKPKDTLMISRTPEVTCVVVDVSHEDPEVKFNWYVDGVEVHNAKTKPREEQYNSTYRVVSVLTVLHQDWLNGKEYKCKVSNKALPAPIEKTISKAKGQPREPQVYTLPPSREEMTKNQVSLTCLVKGFYPSDIAVEWESNGQPENNYKTTPPVLDSDGSFFLYSKLTVDKSRWQQGNVFSCSVMHEALHNHYTQKSLSLSPGK

SEQ ID NO: 42 - protein, 330 aa, synthetic construct
ASTKGPSVFPLAPSSKSTSGGTAALGCLVKDYFPEPVTVSWNSGALTSGVHTFPAVLQSSGLYSLSSVVTVPSSSLGTQTYICNVNHKPSNTKVDKRVEPKSCDKTHTCPPCPAPELLGGPSVFLFPPKPKDTLMISRTPEVTCVVVDVSHEDPEVKFNWYVDGVEVHNAKTKPREEQYASTYRVVSVLTVLHQDWLNGKEYKCKVSNKALPAPIEKTISKAKGQPREPQVYTLPPSREEMTKNQVSLTCLVKGFYPSDIAVEWESNGQPENNYKTTPPVLDSDGSFFLYSKLTVDKSRWQQGNVFSCSVMHEALHNHYTQKSLSLSPGK

SEQ ID NO: 43 - RNA, 344 nt, Homo sapiens
  source 1..344: mol_type = mRNA
atgagcatcggcctcctgtgctgtgcagccttgtctctcctgtgggcaggtccagtgaatgctggtgtcactcagaccccaaaattccaggtcctgaagacaggacagagcatgacactgcagtgtgcccaggatatgaaccatgaatacatgtcctggtatcgacaagacccaggcatggggctgaggctgattcattactcagttggtgctggtatcactgaccaaggagaagtccccaatggctacaatgtctccagatcaaccacagaggatttcccgctcaggctgctgtcggctgctccctcccagacatctgtgtacttctgtgccagcagttactc

SEQ ID NO: 44 - protein, 114 aa, Homo sapiens
MSIGLLCCAALSLLWAGPVNAGVTQTPKFQVLKTGQSMTLQCAQDMNHEYMSWYRQDPGMGLRLIHYSVGAGITDQGEVPNGYNVSRSTTEDFPLRLLSAAPSQTSVYFCASSY

SEQ ID NO: 45 - protein, 5 aa, synthetic construct
TYYIH

SEQ ID NO: 46 - protein, 17 aa, synthetic construct
WFFPGSGNIKYNEKFKG

SEQ ID NO: 47 - protein, 10 aa, synthetic construct
SYYSYDVLDY

SEQ ID NO: 48 - protein, 7 aa, synthetic construct
GYSFTTY

SEQ ID NO: 49 - protein, 6 aa, synthetic construct
FPGSGN

SEQ ID NO: 50 - protein, 10 aa, synthetic construct
SYYSYDVLDY

SEQ ID NO: 51 - protein, 11 aa, synthetic construct
KASQNVGINVV

SEQ ID NO: 52 - protein, 7 aa, synthetic construct
SSSHRYS

SEQ ID NO: 53 - protein, 9 aa, synthetic construct
QQFKSYPLT

SEQ ID NO: 54 - protein, 11 aa, synthetic construct
KASQNVGINVV

SEQ ID NO: 55 - protein, 7 aa, synthetic construct
SSSHRYS

SEQ ID NO: 56 - protein, 9 aa, synthetic construct
QQFKSYPLT

SEQ ID NO: 57 - protein, 5 aa, synthetic construct
NFGMH

SEQ ID NO: 58 - protein, 17 aa, synthetic construct
YISSGSSTIYYADTLKG

SEQ ID NO: 59 - protein, 8 aa, synthetic construct
RGEGAMDY

SEQ ID NO: 60 - protein, 7 aa, synthetic construct
GFTFSNF

SEQ ID NO: 61 - protein, 6 aa, synthetic construct
SSGSST

SEQ ID NO: 62 - protein, 8 aa, synthetic construct
RGEGAMDY

SEQ ID NO: 63 - protein, 10 aa, synthetic construct
RASSSVNYIY

SEQ ID NO: 64 - protein, 7 aa, synthetic construct
YTSNLAP

SEQ ID NO: 65 - protein, 9 aa, synthetic construct
QQFTSSPFT

SEQ ID NO: 66 - protein, 10 aa, synthetic construct
RASSSVNYIY

SEQ ID NO: 67 - protein, 7 aa, synthetic construct
YTSNLAP

SEQ ID NO: 68 - protein, 9 aa, synthetic construct
QQFTSSPFT

SEQ ID NO: 69 - protein, 592 aa, synthetic construct
METDTLLLWVLLLWVPGSTGQVQLVQSGAEVKKPGSSVKVSCKASGYSFTTYYIHWVRQAPGQGLEWMGWFFPGSGNIKYNEKFKGRVTITADTSTSTAYMELSSLRSEDTAVYYCAGSYYSYDVLDYWGQGTTVTVSSGSASAPTLFPLVSCENSPSDTSSVAVGCLAQDFLPDSITFSWKYKNNSDISSTRGFPSVLRGGKYAATSQVLLPSKDVMQGTDEHVVCKVQHPNGNKEKNVPLPVIAELPPKVSVFVPPRDGFFGNPRKSKLICQATGFSPRQIQVSWLREGKQVGSGVTTDQVQAEAKESGPTTYKVTSTLTIKESDWLGQSMFTCRVDHRGLTFQQNASSMCVPDQDTAIRVFAIPPSFASIFLTKSTKLTCLVTDLTTYDSVTISWTRQNGEAVKTHTNISESHPNATFSAVGEASICEDDWNSGERFTCTVTHTDLASSLKQTISRPKGVALHRPDVYLLPPAREQLNLRESATITCLVTGFSPADVFVQWMQRGQPLSPEKYVTSAPMPEPQAPGRYFAHSILTVSEEEWNTGETYTCVVAHEALPNRVTERTVDKSTGKPTLYNVSLVMSDTAGTCY

SEQ ID NO: 70 - protein, 492 aa, synthetic construct
METDTLLLWVLLLWVPGSTGQVQLVQSGAEVKKPGSSVKVSCKASGYSFTTYYIHWVRQAPGQGLEWMGWFFPGSGNIKYNEKFKGRVTITADTSTSTAYMELSSLRSEDTAVYYCAGSYYSYDVLDYWGQGTTVTVSSASPTSPKVFPLSLCSTQPDGNVVIACLVQGFFPQEPLSVTWSESGQGVTARNFPPSQDASGDLYTTSSQLTLPATQCLAGKSVTCHVKHYTNPSQDVTVPCPVPSTPPTPSPSTPPTPSPSCCHPRLSLHRPALEDLLLGSEANLTCTLTGLRDASGVTFTWTPSSGKSAVQGPPERDLCGCYSVSSVLPGCAEPWNHGKTFTCTAAYPESKTPLTATLSKSGNTFRPEVHLLPPPSEELALNELVTLTCLARGFSPKDVLVRWLQGSQELPREKYLTWASRQEPSQGTTTFAVTSILRVAAEDWKKGDTFSCMVGHEALPLAFTQKTIDRLAGKPTHVNVSVVMAEVDGTCY

SEQ ID NO: 71 - protein, 479 aa, synthetic construct
METDTLLLWVLLLWVPGSTGQVQLVQSGAEVKKPGSSVKVSCKASGYSFTTYYIHWVRQAPGQGLEWMGWFFPGSGNIKYNEKFKGRVTITADTSTSTAYMELSSLRSEDTAVYYCAGSYYSYDVLDYWGQGTTVTVSSASPTSPKVFPLSLDSTPQDGNVVVACLVQGFFPQEPLSVTWSESGQNVTARNFPPSQDASGDLYTTSSQLTLPATQCPDGKSVTCHVKHYTNSSQDVTVPCRVPPPPPCCHPRLSLHRPALEDLLLGSEANLTCTLTGLRDASGATFTWTPSSGKSAVQGPPERDLCGCYSVSSVLPGCAQPWNHGETFTCTAAHPELKTPLTANITKSGNTFRPEVHLLPPPSEELALNELVTLTCLARGFSPKDVLVRWLQGSQELPREKYLTWASRQEPSQGTTTYAVTSILRVAAEDWKKGETFSCMVGHEALPLAFTQKTIDRMAGKPTHINVSVVMAEADGTCY

SEQ ID NO: 72 - protein, 234 aa, synthetic construct
METDTLLLWVLLLWVPGSTGDIQMTQSPSFLSASVGDRVTITCKASQNVGINVVWHQQKPGKAPKALIYSSSHRYSGVPSRFSGSGSGTEFTLTISSLQPEDFATYFCQQFKSYPLTFGQGTKLEIKRTVAAPSVFIFPPSDEQLKSGTASVVCLLNNFYPREAKVQWKVDNALQSGNSQESVTEQDSKDSTYSLSSTLTLSKADYEKHKVYACEVTHQGLSSPVTKSFNRGEC

SEQ ID NO: 73 - protein, 453 aa, synthetic construct
GSASAPTLFPLVSCENSPSDTSSVAVGCLAQDFLPDSITFSWKYKNNSDISSTRGFPSVLRGGKYAATSQVLLPSKDVMQGTDEHVVCKVQHPNGNKEKNVPLPVIAELPPKVSVFVPPRDGFFGNPRKSKLICQATGFSPRQIQVSWLREGKQVGSGVTTDQVQAEAKESGPTTYKVTSTLTIKESDWLGQSMFTCRVDHRGLTFQQNASSMCVPDQDTAIRVFAIPPSFASIFLTKSTKLTCLVTDLTTYDSVTISWTRQNGEAVKTHTNISESHPNATFSAVGEASICEDDWNSGERFTCTVTHTDLASSLKQTISRPKGVALHRPDVYLLPPAREQLNLRESATITCLVTGFSPADVFVQWMQRGQPLSPEKYVTSAPMPEPQAPGRYFAHSILTVSEEEWNTGETYTCVVAHEALPNRVTERTVDKSTGKPTLYNVSLVMSDTAGTCY

SEQ ID NO: 74 - protein, 353 aa, synthetic construct
ASPTSPKVFPLSLCSTQPDGNVVIACLVQGFFPQEPLSVTWSESGQGVTARNFPPSQDASGDLYTTSSQLTLPATQCLAGKSVTCHVKHYTNPSQDVTVPCPVPSTPPTPSPSTPPTPSPSCCHPRLSLHRPALEDLLLGSEANLTCTLTGLRDASGVTFTWTPSSGKSAVQGPPERDLCGCYSVSSVLPGCAEPWNHGKTFTCTAAYPESKTPLTATLSKSGNTFRPEVHLLPPPSEELALNELVTLTCLARGFSPKDVLVRWLQGSQELPREKYLTWASRQEPSQGTTTFAVTSILRVAAEDWKKGDTFSCMVGHEALPLAFTQKTIDRLAGKPTHVNVSVVMAEVDGTCY

SEQ ID NO: 75 - protein, 340 aa, synthetic construct
ASPTSPKVFPLSLDSTPQDGNVVVACLVQGFFPQEPLSVTWSESGQNVTARNFPPSQDASGDLYTTSSQLTLPATQCPDGKSVTCHVKHYTNSSQDVTVPCRVPPPPPCCHPRLSLHRPALEDLLLGSEANLTCTLTGLRDASGATFTWTPSSGKSAVQGPPERDLCGCYSVSSVLPGCAQPWNHGETFTCTAAHPELKTPLTANITKSGNTFRPEVHLLPPPSEELALNELVTLTCLARGFSPKDVLVRWLQGSQELPREKYLTWASRQEPSQGTTTYAVTSILRVAAEDWKKGETFSCMVGHEALPLAFTQKTIDRMAGKPTHINVSVVMAEADGTCY

SEQ ID NO: 76 - protein, 159 aa, synthetic construct
MKNHLLFWGVLAVFIKAVHVKAQEDERIVLVDNKCKCARITSRIIRSSEDPNEDIVERNIRIIVPLNNRENISDPTSPLRTRFVYHLSDLCKKCDPTEVELDNQIVTATQSNICDEDSATETCYTYDRNKCYTAVVPLVYGGETKMVETALTPDACYPD

SEQ ID NO: 77-79 - skipped (3 entries)

SEQ ID NO: 80 - protein, 246 aa, synthetic construct
QVQLVQSGAEVKKPGSSVKVSCKASGTDFKLTYIHWVRQAPGQGLEWMGRVSPGSGNTKYNEKFKGRVTITADTSTSTAYMELSSLRSEDTAVYYCAGSYYSYDVLDYWGQGTTVTVSSGGGGSGGGGSGGGGSGGGGSDIQMTQSPSFLSASVGDRVTITCKASQNVEDRVAWYQQKPGKAPKALIYSSSHRYKGVPSRFSGSGSGTEFTLTISSLQPEDFATYFCQQFKSYPLTFGQGTKLEIK

SEQ ID NO: 81 - protein, 107 aa, synthetic construct
DIQMTQSPSFLSASVGDRVTITCKASQNVEDRVAWYQQKPGKAPKALIYSSSHRYKGVPSRFSGSGSGTEFTLTISSLQPEDFATYFCQQFKSYPLTFGQGTKLEIK

SEQ ID NO: 82 - protein, 119 aa, synthetic construct
QVQLVQSGAEVKKPGSSVKVSCKASGTDFKLTYIHWVRQAPGQGLEWMGRVSPGSGNTKYNEKFKGRVTITADTSTSTAYMELSSLRSEDTAVYYCAGSYYSYDVLDYWGQGTTVTVSS

SEQ ID NO: 83 - protein, 246 aa, synthetic construct
QVQLVQSGAEVKKPGSSVKVSCKASGTDFDKIYIHWVRQAPGQGLEWMGRISAGSGNVKYNEKFKGRVTITADTSTSTAYMELSSLRSEDTAVYYCAGSYYSYDVLDYWGQGTTVTVSSGGGGSGGGGSGGGGSGGGGSDIQMTQSPSFLSASVGDRVTITCKASQNVEDRVAWYQQKPGKAPKALIYSSSHRYKGVPSRFSGSGSGTEFTLTISSLQPEDFATYFCQQFKSYPLTFGQGTKLEIK

SEQ ID NO: 84 - protein, 107 aa, synthetic construct; identical to SEQ ID NO: 81

SEQ ID NO: 85 - protein, 119 aa, synthetic construct
QVQLVQSGAEVKKPGSSVKVSCKASGTDFDKIYIHWVRQAPGQGLEWMGRISAGSGNVKYNEKFKGRVTITADTSTSTAYMELSSLRSEDTAVYYCAGSYYSYDVLDYWGQGTTVTVSS

SEQ ID NO: 86 - protein, 246 aa, synthetic construct
QVQLVQSGAEVKKPGSSVKVSCKASGHDFRDFYIHWVRQAPGQGLEWMGRVYPGSGSYRYNEKFKGRVTITADTSTSTAYMELSSLRSEDTAVYYCAGSYYSYDVLDYWGQGTTVTVSSGGGGSGGGGSGGGGSGGGGSDIQMTQSPSFLSASVGDRVTITCKASQNVDDRVAWYQQKPGKAPKALIYSSSHRYKGVPSRFSGSGSGTEFTLTISSLQPEDFATYFCQQFKSYPLTFGQGTKLEIK

SEQ ID NO: 87 - protein, 107 aa, synthetic construct
DIQMTQSPSFLSASVGDRVTITCKASQNVDDRVAWYQQKPGKAPKALIYSSSHRYKGVPSRFSGSGSGTEFTLTISSLQPEDFATYFCQQFKSYPLTFGQGTKLEIK

SEQ ID NO: 88 - protein, 119 aa, synthetic construct
QVQLVQSGAEVKKPGSSVKVSCKASGHDFRDFYIHWVRQAPGQGLEWMGRVYPGSGSYRYNEKFKGRVTITADTSTSTAYMELSSLRSEDTAVYYCAGSYYSYDVLDYWGQGTTVTVSS

SEQ ID NO: 89 - protein, 246 aa, synthetic construct
QVQLVQSGAEVKKPGSSVKVSCKASGHDFKLTYIHWVRQAPGQGLEWMGRISAGSGNVKYNEKFKGRVTITADTSTSTAYMELSSLRSEDTAVYYCAGSYYSYDVLDYWGQGTTVTVSSGGGGSGGGGSGGGGSGGGGSDIQMTQSPSFLSASVGDRVTITCKASQNVDNRVAWYQQKPGKAPKALIYSSSHRYKGVPSRFSGSGSGTEFTLTISSLQPEDFATYFCQQFKSYPLTFGQGTKLEIK

SEQ ID NO: 90 - protein, 107 aa, synthetic construct
DIQMTQSPSFLSASVGDRVTITCKASQNVDNRVAWYQQKPGKAPKALIYSSSHRYKGVPSRFSGSGSGTEFTLTISSLQPEDFATYFCQQFKSYPLTFGQGTKLEIK

SEQ ID NO: 91 - protein, 119 aa, synthetic construct
QVQLVQSGAEVKKPGSSVKVSCKASGHDFKLTYIHWVRQAPGQGLEWMGRISAGSGNVKYNEKFKGRVTITADTSTSTAYMELSSLRSEDTAVYYCAGSYYSYDVLDYWGQGTTVTVSS

SEQ ID NO: 92 - protein, 246 aa, synthetic construct
QVQLVQSGAEVKKPGSSVKVSCKASGTDFKLTYIHWVRQAPGQGLEWMGRIFPGSGNVKYNEKFKGRVTITADTSTSTAYMELSSLRSEDTAVYYCAGSYYSYDVLDYWGQGTTVTVSSGGGGSGGGGSGGGGSGGGGSDIQMTQSPSFLSASVGDRVTITCKASQNVENKVAWHQQKPGKAPKALIYSSSHRYKGVPSRFSGSGSGTEFTLTISSLQPEDFATYFCQQFKSYPLTFGQGTKLEIK

SEQ ID NO: 93 - protein, 107 aa, synthetic construct
DIQMTQSPSFLSASVGDRVTITCKASQNVENKVAWHQQKPGKAPKALIYSSSHRYKGVPSRFSGSGSGTEFTLTISSLQPEDFATYFCQQFKSYPLTFGQGTKLEIK

SEQ ID NO: 94 - protein, 119 aa, synthetic construct
QVQLVQSGAEVKKPGSSVKVSCKASGTDFKLTYIHWVRQAPGQGLEWMGRIFPGSGNVKYNEKFKGRVTITADTSTSTAYMELSSLRSEDTAVYYCAGSYYSYDVLDYWGQGTTVTVSS

SEQ ID NO: 95 - protein, 246 aa, synthetic construct
QVQLVQSGAEVKKPGSSVKVSCKASGTDFDKIYIHWVRQAPGQGLEWMGRIFAGSGNTKYNEKFKGRVTITADTSTSTAYMELSSLRSEDTAVYYCAGSYYSYDVLDYWGQGTTVTVSSGGGGSGGGGSGGGGSGGGGSDIQMTQSPSFLSASVGDRVTITCKASQNVDDRVAWYQQKPGKAPKALIYSSSHRYKGVPSRFSGSGSGTEFTLTISSLQPEDFATYFCQQFKSYPLTFGQGTKLEIK

SEQ ID NO: 96 - protein, 107 aa, synthetic construct; identical to SEQ ID NO: 87

SEQ ID NO: 97 - protein, 119 aa, synthetic construct
QVQLVQSGAEVKKPGSSVKVSCKASGTDFDKIYIHWVRQAPGQGLEWMGRIFAGSGNTKYNEKFKGRVTITADTSTSTAYMELSSLRSEDTAVYYCAGSYYSYDVLDYWGQGTTVTVSS

SEQ ID NO: 98 - protein, 246 aa, synthetic construct
QVQLVQSGAEVKKPGSSVKVSCKASGHDFDKFYIHWVRQAPGQGLEWMGRVSAGSGNVKYNEKFKGRVTITADTSTSTAYMELSSLRSEDTAVYYCAGSYYSYDVLDYWGQGTTVTVSSGGGGSGGGGSGGGGSGGGGSDIQMTQSPSFLSASVGDRVTITCKASQNVGNRVAWYQQKPGKAPKALIYSSSHRYSGVPSRFSGSGSGTEFTLTISSLQPEDFATYFCQQFKSYPLTFGQGTKLEIK

SEQ ID NO: 99 - protein, 107 aa, synthetic construct
DIQMTQSPSFLSASVGDRVTITCKASQNVGNRVAWYQQKPGKAPKALIYSSSHRYSGVPSRFSGSGSGTEFTLTISSLQPEDFATYFCQQFKSYPLTFGQGTKLEIK

SEQ ID NO: 100 - protein, 119 aa, synthetic construct
QVQLVQSGAEVKKPGSSVKVSCKASGHDFDKFYIHWVRQAPGQGLEWMGRVSAGSGNVKYNEKFKGRVTITADTSTSTAYMELSSLRSEDTAVYYCAGSYYSYDVLDYWGQGTTVTVSS

SEQ ID NO: 101 - protein, 246 aa, synthetic construct
QVQLVQSGAEVKKPGSSVKVSCKASGHDFDKFYIHWVRQAPGQGLEWMGRIFAGSGNVKYNEKFKGRVTITADTSTSTAYMELSSLRSEDTAVYYCAGSYYSYDVLDYWGQGTTVTVSSGGGGSGGGGSGGGGSGGGGSDIQMTQSPSFLSASVGDRVTITCKASQNVGDRVAWYQQKPGKAPKALIYSSSHRYKGVPSRFSGSGSGTEFTLTISSLQPEDFATYFCQQFKSYPLTFGQGTKLEIK

SEQ ID NO: 102 - protein, 15 aa, synthetic construct
RASKSVSILGTHLIH

SEQ ID NO: 103 - protein, 7 aa, synthetic construct
AASNLES

SEQ ID NO: 104 - protein, 9 aa, synthetic construct
QQSIEDPWT

SEQ ID NO: 105 - protein, 107 aa, synthetic construct
DIQMTQSPSFLSASVGDRVTITCKASQNVGDRVAWYQQKPGKAPKALIYSSSHRYKGVPSRFSGSGSGTEFTLTISSLQPEDFATYFCQQFKSYPLTFGQGTKLEIK

SEQ ID NO: 106 - protein, 119 aa, synthetic construct
QVQLVQSGAEVKKPGSSVKVSCKASGTDFKLTYIHWVRQAPGQGLEWMGRVSPGSGNVKYNEKFKGRVTITADTSTSTAYMELSSLRSEDTAVYYCAGSYYSYDVLDYWGQGTTVTVSS

SEQ ID NO: 107 - protein, 246 aa, synthetic construct
QVQLVQSGAEVKKPGSSVKVSCKASGTDFDKIYIHWVRQAPGQGLEWMGRVSAGSGNTKYNEKFKGRVTITADTSTSTAYMELSSLRSEDTAVYYCAGSYYSYDVLDYWGQGTTVTVSSGGGGSGGGGSGGGGSGGGGSDIQMTQSPSFLSASVGDRVTITCKASQNVGNRVAWYQQKPGKAPKALIYSSSHRYKGVPSRFSGSGSGTEFTLTISSLQPEDFATYFCQQFKSYPLTFGQGTKLEIK

SEQ ID NO: 108 - protein, 107 aa, synthetic construct
DIQMTQSPSFLSASVGDRVTITCKASQNVGNRVAWYQQKPGKAPKALIYSSSHRYKGVPSRFSGSGSGTEFTLTISSLQPEDFATYFCQQFKSYPLTFGQGTKLEIK

SEQ ID NO: 109 - protein, 119 aa, synthetic construct
QVQLVQSGAEVKKPGSSVKVSCKASGTDFDKIYIHWVRQAPGQGLEWMGRVSAGSGNTKYNEKFKGRVTITADTSTSTAYMELSSLRSEDTAVYYCAGSYYSYDVLDYWGQGTTVTVSS

SEQ ID NO: 110 - protein, 246 aa, synthetic construct
QVQLVQSGAEVKKPGSSVKVSCKASGTDFKLTYIHWVRQAPGQGLEWMGRIFPGSGNVKYNEKFKGRVTITADTSTSTAYMELSSLRSEDTAVYYCAGSYYSYDVLDYWGQGTTVTVSSGGGGSGGGGSGGGGSGGGGSDIQMTQSPSFLSASVGDRVTITCKASQNVDNRVAWYQQKPGKAPKALIYSSSHRYKGVPSRFSGSGSGTEFTLTISSLQPEDFATYFCQQFKSYPLTFGQGTKLEIK

SEQ ID NO: 111 - protein, 107 aa, synthetic construct; identical to SEQ ID NO: 90

SEQ ID NO: 112 - protein, 119 aa, synthetic construct; identical to SEQ ID NO: 94

SEQ ID NO: 113 - protein, 246 aa, synthetic construct
QVQLVQSGAEVKKPGSSVKVSCKASGTDFDKIYIHWVRQAPGQGLEWMGRISAGSGNTKYNEKFKGRVTITADTSTSTAYMELSSLRSEDTAVYYCAGSYYSYDVLDYWGQGTTVTVSSGGGGSGGGGSGGGGSGGGGSDIQMTQSPSFLSASVGDRVTITCKASQNVDDRVAWYQQKPGKAPKALIYSSSHRYKGVPSRFSGSGSGTEFTLTISSLQPEDFATYFCQQFKSYPLTFGQGTKLEIK

SEQ ID NO: 114 - protein, 107 aa, synthetic construct; identical to SEQ ID NO: 87

SEQ ID NO: 115 - protein, 119 aa, synthetic construct
QVQLVQSGAEVKKPGSSVKVSCKASGTDFDKIYIHWVRQAPGQGLEWMGRISAGSGNTKYNEKFKGRVTITADTSTSTAYMELSSLRSEDTAVYYCAGSYYSYDVLDYWGQGTTVTVSS

SEQ ID NO: 116 - protein, 246 aa, synthetic construct
QVQLVQSGAEVKKPGSSVKVSCKASGTDFRLTYIHWVRQAPGQGLEWMGRVSPGSGNTKYNEKFKGRVTITADTSTSTAYMELSSLRSEDTAVYYCAGSYYSYDVLDYWGQGTTVTVSSGGGGSGGGGSGGGGSGGGGSDIQMTQSPSFLSASVGDRVTITCKASQNVDNKVAWHQQKPGKAPKALIYSSSHRYKGVPSRFSGSGSGTEFTLTISSLQPEDFATYFCQQFKSYPLTFGQGTKLEIK

SEQ ID NO: 117 - protein, 107 aa, synthetic construct
DIQMTQSPSFLSASVGDRVTITCKASQNVDNKVAWHQQKPGKAPKALIYSSSHRYKGVPSRFSGSGSGTEFTLTISSLQPEDFATYFCQQFKSYPLTFGQGTKLEIK

SEQ ID NO: 118 - protein, 119 aa, synthetic construct
QVQLVQSGAEVKKPGSSVKVSCKASGTDFRLTYIHWVRQAPGQGLEWMGRVSPGSGNTKYNEKFKGRVTITADTSTSTAYMELSSLRSEDTAVYYCAGSYYSYDVLDYWGQGTTVTVSS

SEQ ID NO: 119 - protein, 246 aa, synthetic construct
QVQLVQSGAEVKKPGSSVKVSCKASGGTFRLTYIHWVRQAPGQGLEWMGRVYPGSGNTKYNEKFKGRVTITADTSTSTAYMELSSLRSEDTAVYYCAGSYYSYDVLDYWGQGTTVTVSSGGGGSGGGGSGGGGSGGGGSDIQMTQSPSFLSASVGDRVTITCKASQNVDDRVAWYQQKPGKAPKALIYSSSHRYKGVPSRFSGSGSGTEFTLTISSLQPEDFATYFCQQFKSYPLTFGQGTKLEIK

SEQ ID NO: 120 - protein, 107 aa, synthetic construct; identical to SEQ ID NO: 87

SEQ ID NO: 121 - protein, 119 aa, synthetic construct
QVQLVQSGAEVKKPGSSVKVSCKASGGTFRLTYIHWVRQAPGQGLEWMGRVYPGSGNTKYNEKFKGRVTITADTSTSTAYMELSSLRSEDTAVYYCAGSYYSYDVLDYWGQGTTVTVSS

SEQ ID NO: 122 - protein, 246 aa, synthetic construct
QVQLVQSGAEVKKPGSSVKVSCKASGTDFRLTYIHWVRQAPGQGLEWMGRIFPGSGNTKYNEKFKGRVTITADTSTSTAYMELSSLRSEDTAVYYCAGSYYSYDVLDYWGQGTTVTVSSGGGGSGGGGSGGGGSGGGGSDIQMTQSPSFLSASVGDRVTITCKASQNVDDRVAWYQQKPGKAPKALIYSSSHRYKGVPSRFSGSGSGTEFTLTISSLQPEDFATYFCQQFKSYPLTFGQGTKLEIK

SEQ ID NO: 123 - protein, 107 aa, synthetic construct; identical to SEQ ID NO: 87

SEQ ID NO: 124 - protein, 119 aa, synthetic construct
QVQLVQSGAEVKKPGSSVKVSCKASGTDFRLTYIHWVRQAPGQGLEWMGRIFPGSGNTKYNEKFKGRVTITADTSTSTAYMELSSLRSEDTAVYYCAGSYYSYDVLDYWGQGTTVTVSS

SEQ ID NO: 125 - protein, 246 aa, synthetic construct
QVQLVQSGAEVKKPGSSVKVSCKASGTDFKLTYIHWVRQAPGQGLEWMGRIFPGSGNVKYNEKFKGRVTITADTSTSTAYMELSSLRSEDTAVYYCAGSYYSYDVLDYWGQGTTVTVSSGGGGSGGGGSGGGGSGGGGSDIQMTQSPSFLSASVGDRVTITCKASQNVEDRVAWYQQKPGKAPKALIYSSSHRYKGVPSRFSGSGSGTEFTLTISSLQPEDFATYFCQQFKSYPLTFGQGTKLEIK

SEQ ID NO: 126 - protein, 107 aa, synthetic construct; identical to SEQ ID NO: 81

SEQ ID NO: 127 - protein, 119 aa, synthetic construct; identical to SEQ ID NO: 94

SEQ ID NO: 128 - protein, 246 aa, synthetic construct
QVQLVQSGAEVKKPGSSVKVSCKASGGTFRLTYIHWVRQAPGQGLEWMGRISAGSGNVKYNEKFKGRVTITADTSTSTAYMELSSLRSEDTAVYYCAGSYYSYDVLDYWGQGTTVTVSSGGGGSGGGGSGGGGSGGGGSDIQMTQSPSFLSASVGDRVTITCKASQNVGDRVAWYQQKPGKAPKALIYSSSHRYKGVPSRFSGSGSGTEFTLTISSLQPEDFATYFCQQFKSYPLTFGQGTKLEIK

SEQ ID NO: 129 - protein, 107 aa, synthetic construct; identical to SEQ ID NO: 105

SEQ ID NO: 130 - protein, 119 aa, synthetic construct
QVQLVQSGAEVKKPGSSVKVSCKASGGTFRLTYIHWVRQAPGQGLEWMGRISAGSGNVKYNEKFKGRVTITADTSTSTAYMELSSLRSEDTAVYYCAGSYYSYDVLDYWGQGTTVTVSS

SEQ ID NO: 131 - protein, 246 aa, synthetic construct
QVQLVQSGAEVKKPGSSVKVSCKASGGTFDKTYIHWVRQAPGQGLEWMGRISAGSGNTKYNEKFKGRVTITADTSTSTAYMELSSLRSEDTAVYYCAGSYYSYDVLDYWGQGTTVTVSSGGGGSGGGGSGGGGSGGGGSDIQMTQSPSFLSASVGDRVTITCKASQNVDDRVAWYQQKPGKAPKALIYSSSHRYKGVPSRFSGSGSGTEFTLTISSLQPEDFATYFCQQFKSYPLTFGQGTKLEIK

SEQ ID NO: 132 - protein, 107 aa, synthetic construct; identical to SEQ ID NO: 87

SEQ ID NO: 133 - protein, 119 aa, synthetic construct
QVQLVQSGAEVKKPGSSVKVSCKASGGTFDKTYIHWVRQAPGQGLEWMGRISAGSGNTKYNEKFKGRVTITADTSTSTAYMELSSLRSEDTAVYYCAGSYYSYDVLDYWGQGTTVTVSS

SEQ ID NO: 134 - protein, 246 aa, synthetic construct
QVQLVQSGAEVKKPGSSVKVSCKASGHDFDKFYIHWVRQAPGQGLEWMGRISAGSGNTKYNEKFKGRVTITADTSTSTAYMELSSLRSEDTAVYYCAGSYYSYDVLDYWGQGTTVTVSSGGGGSGGGGSGGGGSGGGGSDIQMTQSPSFLSASVGDRVTITCKASQNVDDRVAWYQQKPGKAPKALIYSSSHRYKGVPSRFSGSGSGTEFTLTISSLQPEDFATYFCQQFKSYPLTFGQGTKLEIK

SEQ ID NO: 135 - protein, 107 aa, synthetic construct; identical to SEQ ID NO: 87

SEQ ID NO: 136 - protein, 119 aa, synthetic construct
QVQLVQSGAEVKKPGSSVKVSCKASGHDFDKFYIHWVRQAPGQGLEWMGRISAGSGNTKYNEKFKGRVTITADTSTSTAYMELSSLRSEDTAVYYCAGSYYSYDVLDYWGQGTTVTVSS

SEQ ID NO: 137 - protein, 246 aa, synthetic construct
QVQLVQSGAEVKKPGSSVKVSCKASGTDFKLTYIHWVRQAPGQGLEWMGRISAGSGNVKYNEKFKGRVTITADTSTSTAYMELSSLRSEDTAVYYCAGSYYSYDVLDYWGQGTTVTVSSGGGGSGGGGSGGGGSGGGGSDIQMTQSPSFLSASVGDRVTITCKASQNVDNKVAWHQQKPGKAPKALIYSSSHRYKGVPSRFSGSGSGTEFTLTISSLQPEDFATYFCQQFKSYPLTFGQGTKLEIK

SEQ ID NO: 138 - protein, 107 aa, synthetic construct; identical to SEQ ID NO: 117

SEQ ID NO: 139 - protein, 119 aa, synthetic construct
QVQLVQSGAEVKKPGSSVKVSCKASGTDFKLTYIHWVRQAPGQGLEWMGRISAGSGNVKYNEKFKGRVTITADTSTSTAYMELSSLRSEDTAVYYCAGSYYSYDVLDYWGQGTTVTVSS

SEQ ID NO: 140 - protein, 246 aa, synthetic construct
QVQLVQSGAEVKKPGSSVKVSCKASGHDFRLTYIHWVRQAPGQGLEWMGRISAGSGNVKYNEKFKGRVTITADTSTSTAYMELSSLRSEDTAVYYCAGSYYSYDVLDYWGQGTTVTVSSGGGGSGGGGSGGGGSGGGGSDIQMTQSPSFLSASVGDRVTITCKASQNVADRVAWYQQKPGKAPKALIYSSSHRYKGVPSRFSGSGSGTEFTLTISSLQPEDFATYFCQQFKSYPLTFGQGTKLEIK

SEQ ID NO: 141 - protein, 107 aa, synthetic construct
DIQMTQSPSFLSASVGDRVTITCKASQNVADRVAWYQQKPGKAPKALIYSSSHRYKGVPSRFSGSGSGTEFTLTISSLQPEDFATYFCQQFKSYPLTFGQGTKLEIK

SEQ ID NO: 142 - protein, 119 aa, synthetic construct
QVQLVQSGAEVKKPGSSVKVSCKASGHDFRLTYIHWVRQAPGQGLEWMGRISAGSGNVKYNEKFKGRVTITADTSTSTAYMELSSLRSEDTAVYYCAGSYYSYDVLDYWGQGTTVTVSS

SEQ ID NO: 143 - protein, 246 aa, synthetic construct
QVQLVQSGAEVKKPGSSVKVSCKASGHDFHLWYIHWVRQAPGQGLEWMGRVSAGSGNVKYNEKFKGRVTITADTSTSTAYMELSSLRSEDTAVYYCAGSYYSYDVLDYWGQGTTVTVSSGGGGSGGGGSGGGGSGGGGSDIQMTQSPSFLSASVGDRVTITCKASQNVDNKVAWHQQKPGKAPKALIYSSSHRYKGVPSRFSGSGSGTEFTLTISSLQPEDFATYFCQQFKSYPLTFGQGTKLEIK

SEQ ID NO: 144 - protein, 107 aa, synthetic construct; identical to SEQ ID NO: 117

SEQ ID NO: 145 - protein, 119 aa, synthetic construct
QVQLVQSGAEVKKPGSSVKVSCKASGHDFHLWYIHWVRQAPGQGLEWMGRVSAGSGNVKYNEKFKGRVTITADTSTSTAYMELSSLRSEDTAVYYCAGSYYSYDVLDYWGQGTTVTVSS

SEQ ID NO: 146 - protein, 246 aa, synthetic construct
QVQLVQSGAEVKKPGSSVKVSCKASGHDFHLWYIHWVRQAPGQGLEWMGRVFAGSGNTKYNEKFKGRVTITADTSTSTAYMELSSLRSEDTAVYYCAGSYYSYDVLDYWGQGTTVTVSSGGGGSGGGGSGGGGSGGGGSDIQMTQSPSFLSASVGDRVTITCKASQNVEDKVAWYQQKPGKAPKALIYSSSHRYKGVPSRFSGSGSGTEFTLTISSLQPEDFATYFCQQFKSYPLTFGQGTKLEIK

SEQ ID NO: 147 - protein, 107 aa, synthetic construct
DIQMTQSPSFLSASVGDRVTITCKASQNVEDKVAWYQQKPGKAPKALIYSSSHRYKGVPSRFSGSGSGTEFTLTISSLQPEDFATYFCQQFKSYPLTFGQGTKLEIK

SEQ ID NO: 148 - protein, 119 aa, synthetic construct
QVQLVQSGAEVKKPGSSVKVSCKASGHDFHLWYIHWVRQAPGQGLEWMGRVFAGSGNTKYNEKFKGRVTITADTSTSTAYMELSSLRSEDTAVYYCAGSYYSYDVLDYWGQGTTVTVSS

SEQ ID NO: 149 - protein, 246 aa, synthetic construct
QVQLVQSGAEVKKPGSSVKVSCKASGTDFKLTYIHWVRQAPGQGLEWMGRIFPGSGNTKYNEKFKGRVTITADTSTSTAYMELSSLRSEDTAVYYCAGSYYSYDVLDYWGQGTTVTVSSGGGGSGGGGSGGGGSGGGGSDIQMTQSPSFLSASVGDRVTITCKASQNVDDRVAWYQQKPGKAPKALIYSSSHRYKGVPSRFSGSGSGTEFTLTISSLQPEDFATYFCQQFKSYPLTFGQGTKLEIK

SEQ ID NO: 150 - protein, 107 aa, synthetic construct; identical to SEQ ID NO: 87

SEQ ID NO: 151 - protein, 119 aa, synthetic construct
QVQLVQSGAEVKKPGSSVKVSCKASGTDFKLTYIHWVRQAPGQGLEWMGRIFPGSGNTKYNEKFKGRVTITADTSTSTAYMELSSLRSEDTAVYYCAGSYYSYDVLDYWGQGTTVTVSS

SEQ ID NO: 152 - skipped

SEQ ID NO: 153 - protein, 246 aa, synthetic construct
QVQLVQSGAEVKKPGSSVKVSCKASGTDFKLTYIHWVRQAPGQGLEWMGRVSAGSGNVKYNEKFKGRVTITADTSTSTAYMELSSLRSEDTAVYYCAGSYYSYDVLDYWGQGTTVTVSSGGGGSGGGGSGGGGSGGGGSDIQMTQSPSFLSASVGDRVTITCKASQNVGNRVAWYQQKPGKAPKALIYSSSHRYKGVPSRFSGSGSGTEFTLTISSLQPEDFATYFCQQFKSYPLTFGQGTKLEIK

SEQ ID NO: 154 - protein, 107 aa, synthetic construct; identical to SEQ ID NO: 108

SEQ ID NO: 155 - protein, 119 aa, synthetic construct
QVQLVQSGAEVKKPGSSVKVSCKASGTDFKLTYIHWVRQAPGQGLEWMGRVSAGSGNVKYNEKFKGRVTITADTSTSTAYMELSSLRSEDTAVYYCAGSYYSYDVLDYWGQGTTVTVSS

SEQ ID NO: 156 - protein, 246 aa, synthetic construct
QVQLVQSGAEVKKPGSSVKVSCKASGTDFKLTYIHWVRQAPGQGLEWMGRISPGSGNTKYNEKFKGRVTITADTSTSTAYMELSSLRSEDTAVYYCAGSYYSYDVLDYWGQGTTVTVSSGGGGSGGGGSGGGGSGGGGSDIQMTQSPSFLSASVGDRVTITCKASQNVGDRVAWYQQKPGKAPKALIYSSSHRYKGVPSRFSGSGSGTEFTLTISSLQPEDFATYFCQQFKSYPLTFGQGTKLEIK

SEQ ID NO: 157 - protein, 107 aa, synthetic construct; identical to SEQ ID NO: 105

SEQ ID NO: 158 - protein, 119 aa, synthetic construct
QVQLVQSGAEVKKPGSSVKVSCKASGTDFKLTYIHWVRQAPGQGLEWMGRISPGSGNTKYNEKFKGRVTITADTSTSTAYMELSSLRSEDTAVYYCAGSYYSYDVLDYWGQGTTVTVSS

SEQ ID NO: 159 - protein, 246 aa, synthetic construct
QVQLVQSGAEVKKPGSSVKVSCKASGHDFHLWYIHWVRQAPGQGLEWMGRISPGSGNVKYNEKFKGRVTITADTSTSTAYMELSSLRSEDTAVYYCAGSYYSYDVLDYWGQGTTVTVSSGGGGSGGGGSGGGGSGGGGSDIQMTQSPSFLSASVGDRVTITCKASQNVGDRVAWHQQKPGKAPKALIYSSSHRYKGVPSRFSGSGSGTEFTLTISSLQPEDFATYFCQQFKSYPLTFGQGTKLEIK

SEQ ID NO: 160 - protein, 107 aa, synthetic construct
DIQMTQSPSFLSASVGDRVTITCKASQNVGDRVAWHQQKPGKAPKALIYSSSHRYKGVPSRFSGSGSGTEFTLTISSLQPEDFATYFCQQFKSYPLTFGQGTKLEIK

SEQ ID NO: 161 - protein, 119 aa, synthetic construct
QVQLVQSGAEVKKPGSSVKVSCKASGHDFHLWYIHWVRQAPGQGLEWMGRISPGSGNVKYNEKFKGRVTITADTSTSTAYMELSSLRSEDTAVYYCAGSYYSYDVLDYWGQGTTVTVSS

SEQ ID NO: 162 - protein, 246 aa, synthetic construct
QVQLVQSGAEVKKPGSSVKVSCKASGHDFKLTYIHWVRQAPGQGLEWMGRISAGSGNVKYNEKFKGRVTITADTSTSTAYMELSSLRSEDTAVYYCAGSYYSYDVLDYWGQGTTVTVSSGGGGSGGGGSGGGGSGGGGSDIQMTQSPSFLSASVGDRVTITCKASQNVDDRVAWYQQKPGKAPKALIYSSSHRYKGVPSRFSGSGSGTEFTLTISSLQPEDFATYFCQQFKSYPLTFGQGTKLEIK

SEQ ID NO: 163 - protein, 107 aa, synthetic construct; identical to SEQ ID NO: 87

SEQ ID NO: 164 - protein, 10 aa, synthetic construct
GHDFRLTYIH

SEQ ID NO: 165 - protein, 17 aa, synthetic construct
RVSAGSGNVKYNEKFKG

SEQ ID NO: 166 - protein, 107 aa, synthetic construct; identical to SEQ ID NO: 87

SEQ ID NO: 167 - protein, 7 aa, synthetic construct
SSSHRYK

SEQ ID NO: 168 - protein, 119 aa, synthetic construct
QVQLVQSGAEVKKPGSSVKVSCKASGHDFRLTYIHWVRQAPGQGLEWMGRVSAGSGNVKYNEKFKGRVTITADTSTSTAYMELSSLRSEDTAVYYCAVSYYSYDVLDYWGQGTTVTVSS

SEQ ID NO: 169 - protein, 107 aa, synthetic construct; identical to SEQ ID NO: 141

SEQ ID NO: 170 - protein, 119 aa, synthetic construct; identical to SEQ ID NO: 115

SEQ ID NO: 171 - protein, 11 aa, synthetic construct
KASQNVADRVV

SEQ ID NO: 172 - protein, 107 aa, synthetic construct; identical to SEQ ID NO: 81

SEQ ID NO: 173 - protein, 107 aa, synthetic construct
DIQMTQSPSFLSASVGDRVTITCKASQNVADRVVWHQQKPGKAPKALIYSSSHRYKGVPSRFSGSGSGTEFTLTISSLQPEDFATYFCQQFKSYPLTFGQGTKLEIK

SEQ ID NO: 174 - protein, 246 aa, synthetic construct
QVQLVQSGAEVKKPGSSVKVSCKASGTDFRLTYIHWVRQAPGQGLEWMGRISPGSGNTKYNEKFKGRVTITADTSTSTAYMELSSLRSEDTAVYYCAGSYYSYDVLDYWGQGTTVTVSSGGGGSGGGGSGGGGSGGGGSDIQMTQSPSFLSASVGDRVTITCKASQNVGNRVAWYQQKPGKAPKALIYSSSHRYKGVPSRFSGSGSGTEFTLTISSLQPEDFATYFCQQFKSYPLTFGQGTKLEIK

SEQ ID NO: 175 - protein, 107 aa, synthetic construct; identical to SEQ ID NO: 108

SEQ ID NO: 176 - protein, 119 aa, synthetic construct
QVQLVQSGAEVKKPGSSVKVSCKASGTDFRLTYIHWVRQAPGQGLEWMGRISPGSGNTKYNEKFKGRVTITADTSTSTAYMELSSLRSEDTAVYYCAGSYYSYDVLDYWGQGTTVTVSS

SEQ ID NO: 177 - protein, 246 aa, synthetic construct
QVQLVQSGAEVKKPGSSVKVSCKASGHDFDKTYIHWVRQAPGQGLEWMGRVSAGSGNVKYNEKFKGRVTITADTSTSTAYMELSSLRSEDTAVYYCAGSYYSYDVLDYWGQGTTVTVSSGGGGSGGGGSGGGGSGGGGSDIQMTQSPSFLSASVGDRVTITCKASQNVEDRVAWYQQKPGKAPKALIYSSSHRYKGVPSRFSGSGSGTEFTLTISSLQPEDFATYFCQQFKSYPLTFGQGTKLEIK

SEQ ID NO: 178 - protein, 107 aa, synthetic construct; identical to SEQ ID NO: 81

SEQ ID NO: 179 - protein, 119 aa, synthetic construct
QVQLVQSGAEVKKPGSSVKVSCKASGHDFDKTYIHWVRQAPGQGLEWMGRVSAGSGNVKYNEKFKGRVTITADTSTSTAYMELSSLRSEDTAVYYCAGSYYSYDVLDYWGQGTTVTVSS

SEQ ID NO: 180 - protein, 246 aa, synthetic construct
QVQLVQSGAEVKKPGSSVKVSCKASGHDFKLTYIHWVRQAPGQGLEWMGRVSPGSGNTKYNEKFKGRVTITADTSTSTAYMELSSLRSEDTAVYYCAGSYYSYDVLDYWGQGTTVTVSSGGGGSGGGGSGGGGSGGGGSDIQMTQSPSFLSASVGDRVTITCKASQNVEDRVAWHQQKPGKAPKALIYSSSHRYKGVPSRFSGSGSGTEFTLTISSLQPEDFATYFCQQFKSYPLTFGQGTKLEIK

SEQ ID NO: 181 - protein, 107 aa, synthetic construct
DIQMTQSPSFLSASVGDRVTITCKASQNVEDRVAWHQQKPGKAPKALIYSSSHRYKGVPSRFSGSGSGTEFTLTISSLQPEDFATYFCQQFKSYPLTFGQGTKLEIK

SEQ ID NO: 182 - protein, 119 aa, synthetic construct
QVQLVQSGAEVKKPGSSVKVSCKASGHDFKLTYIHWVRQAPGQGLEWMGRVSPGSGNTKYNEKFKGRVTITADTSTSTAYMELSSLRSEDTAVYYCAGSYYSYDVLDYWGQGTTVTVSS

SEQ ID NO: 183 - protein, 246 aa, synthetic construct
QVQLVQSGAEVKKPGSSVKVSCKASGHDFDKTYIHWVRQAPGQGLEWMGRIYPGSGNVKYNEKFKGRVTITADTSTSTAYMELSSLRSEDTAVYYCAGSYYSYDVLDYWGQGTTVTVSSGGGGSGGGGSGGGGSGGGGSDIQMTQSPSFLSASVGDRVTITCKASQNVADRVAWYQQKPGKAPKALIYSSSHRYKGVPSRFSGSGSGTEFTLTISSLQPEDFATYFCQQFKSYPLTFGQGTKLEIK

SEQ ID NO: 184 - protein, 107 aa, synthetic construct; identical to SEQ ID NO: 141

SEQ ID NO: 185 - protein, 119 aa, synthetic construct
QVQLVQSGAEVKKPGSSVKVSCKASGHDFDKTYIHWVRQAPGQGLEWMGRIYPGSGNVKYNEKFKGRVTITADTSTSTAYMELSSLRSEDTAVYYCAGSYYSYDVLDYWGQGTTVTVSS

SEQ ID NO: 186 - protein, 246 aa, synthetic construct
QVQLVQSGAEVKKPGSSVKVSCKASGTDFDKTYIHWVRQAPGQGLEWMGRISAGSGNVKYNEKFKGRVTITADTSTSTAYMELSSLRSEDTAVYYCAGSYYSYDVLDYWGQGTTVTVSSGGGGSGGGGSGGGGSGGGGSDIQMTQSPSFLSASVGDRVTITCKASQNVDDRVAWYQQKPGKAPKALIYSSSHRYKGVPSRFSGSGSGTEFTLTISSLQPEDFATYFCQQFKSYPLTFGQGTKLEIK

SEQ ID NO: 187 - protein, 107 aa, synthetic construct; identical to SEQ ID NO: 87

SEQ ID NO: 188 - protein, 119 aa, synthetic construct
QVQLVQSGAEVKKPGSSVKVSCKASGTDFDKTYIHWVRQAPGQGLEWMGRISAGSGNVKYNEKFKGRVTITADTSTSTAYMELSSLRSEDTAVYYCAGSYYSYDVLDYWGQGTTVTVSS

SEQ ID NO: 189 - protein, 246 aa, synthetic construct
QVQLVQSGAEVKKPGSSVKVSCKASGTDFDKIYIHWVRQAPGQGLEWMGRISAGSGNIKYNEKFKGRVTITADTSTSTAYMELSSLRSEDTAVYYCAGSYYSYDVLDYWGQGTTVTVSSGGGGSGGGGSGGGGSGGGGSDIQMTQSPSFLSASVGDRVTITCKASQNVDDRVAWYQQKPGKAPKALIYSSSHRYKGVPSRFSGSGSGTEFTLTISSLQPEDFATYFCQQFKSYPLTFGQGTKLEIK

SEQ ID NO: 190 - protein, 107 aa, synthetic construct; identical to SEQ ID NO: 87

SEQ ID NO: 191 - protein, 119 aa, synthetic construct
QVQLVQSGAEVKKPGSSVKVSCKASGTDFDKIYIHWVRQAPGQGLEWMGRISAGSGNIKYNEKFKGRVTITADTSTSTAYMELSSLRSEDTAVYYCAGSYYSYDVLDYWGQGTTVTVSS

SEQ ID NO: 192 - protein, 246 aa, synthetic construct
QVQLVQSGAEVKKPGSSVKVSCKASGTDFDKIYIHWVRQAPGQGLEWMGRISAGSGNVKYNEKFKGRVTITADTSTSTAYMELSSLRSEDTAVYYCAGSYYSYDVLDYWGQGTTVTVSSGGGGSGGGGSGGGGSGGGGSDIQMTQSPSFLSASVGDRVTITCKASQNVGDRVAWYQQKPGKAPKALIYSSSHRYKGVPSRFSGSGSGTEFTLTISSLQPEDFATYFCQQFKSYPLTFGQGTKLEIK

SEQ ID NO: 193 - protein, 107 aa, synthetic construct; identical to SEQ ID NO: 105

SEQ ID NO: 194 - protein, 119 aa, synthetic construct; identical to SEQ ID NO: 85

SEQ ID NO: 195 - protein, 246 aa, synthetic construct
QVQLVQSGAEVKKPGSSVKVSCKASGGTFKLTYIHWVRQAPGQGLEWMGRVSAGSGNVKYNEKFKGRVTITADTSTSTAYMELSSLRSEDTAVYYCAGSYYSYDVLDYWGQGTTVTVSSGGGGSGGGGSGGGGSGGGGSDIQMTQSPSFLSASVGDRVTITCKASQNVDDRVAWYQQKPGKAPKALIYSSSHRYKGVPSRFSGSGSGTEFTLTISSLQPEDFATYFCQQFKSYPLTFGQGTKLEIK

SEQ ID NO: 196 - protein, 107 aa, synthetic construct; identical to SEQ ID NO: 87

SEQ ID NO: 197 - protein, 119 aa, synthetic construct
QVQLVQSGAEVKKPGSSVKVSCKASGGTFKLTYIHWVRQAPGQGLEWMGRVSAGSGNVKYNEKFKGRVTITADTSTSTAYMELSSLRSEDTAVYYCAGSYYSYDVLDYWGQGTTVTVSS

SEQ ID NO: 198 - protein, 246 aa, synthetic construct
QVQLVQSGAEVKKPGSSVKVSCKASGTDFKLTYIHWVRQAPGQGLEWMGRISPGSGNVKYNEKFKGRVTITADTSTSTAYMELSSLRSEDTAVYYCAGSYYSYDVLDYWGQGTTVTVSSGGGGSGGGGSGGGGSGGGGSDIQMTQSPSFLSASVGDRVTITCKASQNVDNRVAWHQQKPGKAPKALIYSSSHRYKGVPSRFSGSGSGTEFTLTISSLQPEDFATYFCQQFKSYPLTFGQGTKLEIK

SEQ ID NO: 199 - protein, 107 aa, synthetic construct
DIQMTQSPSFLSASVGDRVTITCKASQNVDNRVAWHQQKPGKAPKALIYSSSHRYKGVPSRFSGSGSGTEFTLTISSLQPEDFATYFCQQFKSYPLTFGQGTKLEIK

SEQ ID NO: 200 - protein, 119 aa, synthetic construct
QVQLVQSGAEVKKPGSSVKVSCKASGTDFKLTYIHWVRQAPGQGLEWMGRISPGSGNVKYNEKFKGRVTITADTSTSTAYMELSSLRSEDTAVYYCAGSYYSYDVLDYWGQGTTVTVSS

SEQ ID NO: 201 - protein, 246 aa, synthetic construct
QVQLVQSGAEVKKPGSSVKVSCKASGHDFDKFYIHWVRQAPGQGLEWMGRVSAGSGNTKYNEKFKGRVTITADTSTSTAYMELSSLRSEDTAVYYCAGSYYSYDVLDYWGQGTTVTVSSGGGGSGGGGSGGGGSGGGGSDIQMTQSPSFLSASVGDRVTITCKASQNVDNRVAWYQQKPGKAPKALIYSSSHRYKGVPSRFSGSGSGTEFTLTISSLQPEDFATYFCQQFKSYPLTFGQGTKLEIK

SEQ ID NO: 202 - protein, 107 aa, synthetic construct; identical to SEQ ID NO: 90

SEQ ID NO: 203 - protein, 107 aa, synthetic construct [sequence omitted]

SEQ ID NO: 204 - protein, 246 aa, synthetic construct
QVQLVQSGAEVKKPGSSVKVSCKASGTDFDKFYIHWVRQAPGQGLEWMGRVSAGSGNVKYNEKFKGRVTITADTSTSTAYMELSSLRSEDTAVYYCAGSYYSYDVLDYWGQGTTVTVSSGGGGSGGGGSGGGGSGGGGSDIQMTQSPSFLSASVGDRVTITCKASQNVGDRVVWYQQKPGKAPKALIYSSSHRYKGVPSRFSGSGSGTEFTLTISSLQPEDFATYFCQQFKSYPLTFGQGTKLEIK

SEQ ID NO: 205 - protein, 119 aa, synthetic construct
QVQLVQSGAEVKKPGSSVKVSCKASGTDFDKFYIHWVRQAPGQGLEWMGRVSAGSGNVKYNEKFKGRVTITADTSTSTAYMELSSLRSEDTAVYYCAGSYYSYDVLDYWGQGTTVTVSS

SEQ ID NO: 206 - protein, 227 aa, synthetic construct
DKTHTCPPCPAPELLGGPSVFLFPPKPKDTLMISRTPEVTCVVVDVSHEDPEVKFNWYVDGVEVHNAKTKPREEQYASTYRVVSVLTVLHQDWLNGKEYKCKVSNKALPAPIEKTISKAKGQPREPQVYTLPPCREEMTKNQVSLWCLVKGFYPSDIAVEWESNGQPENNYKTTPPVLDSDGSFFLYSKLTVDKSRWQQGNVFSCSVMHEALHNHYTQKSLSLSPGK

SEQ ID NO: 207 - protein, 330 aa, synthetic construct
ASTKGPSVFPLAPSSKSTSGGTAALGCLVKDYFPEPVTVSWNSGALTSGVHTFPAVLQSSGLYSLSSVVTVPSSSLGTQTYICNVNHKPSNTKVDKRVEPKSCDKTHTCPPCPAPELLGGPSVFLFPPKPKDTLMISRTPEVTCVVVDVSHEDPEVKFNWYVDGVEVHNAKTKPREEQYASTYRVVSVLTVLHQDWLNGKEYKCKVSNKALPAPIEKTISKAKGQPREPQVCTLPPSREEMTKNQVSLSCAVKGFYPSDIAVEWESNGQPENNYKTTPPVLDSDGSFFLVSKLTVDKSRWQQGNVFSCSVMHEALHNHYTQKSLSLSPGK

SEQ ID NO: 208 - protein, 246 aa, synthetic construct
QVQLVQSGAEVKKPGSSVKVSCKASGYSFTTYYIHWVRQAPGQGLEWMGWFSAGSGNTKYNEKFKGRVTITADTSTSTAYMELSSLRSEDTAVYYCAGSYYSYDVLDYWGQGTTVTVSSGGGGSGGGGSGGGGSGGGGSDIQMTQSPSFLSASVGDRVTITCKASQNVGINVVWHQQKPGKAPKALIYSSSHRYSGVPSRFSGSGSGTEFTLTISSLQPEDFATYFCQQFKSYPLTFGQGTKLEIK

SEQ ID NO: 209 - protein, 119 aa, synthetic construct
QVQLVQSGAEVKKPGSSVKVSCKASGYSFTTYYIHWVRQAPGQGLEWMGWFSAGSGNTKYNEKFKGRVTITADTSTSTAYMELSSLRSEDTAVYYCAGSYYSYDVLDYWGQGTTVTVSS

SEQ ID NO: 210 - protein, 246 aa, synthetic construct
QVQLVQSGAEVKKPGSSVKVSCKASGYSFTTYYIHWVRQAPGQGLEWMGWFFPGSGNTKYNEKFKGRVTITADTSTSTAYMELSSLRSEDTAVYYCAGSYYSYDVLDYWGQGTTVTVSSGGGGSGGGGSGGGGSGGGGSDIQMTQSPSFLSASVGDRVTITCKASQNVGINVVWHQQKPGKAPKALIYSSSHRYSGVPSRFSGSGSGTEFTLTISSLQPEDFATYFCQQFKSYPLTFGQGTKLEIK

SEQ ID NO: 211 - protein, 119 aa, synthetic construct
QVQLVQSGAEVKKPGSSVKVSCKASGYSFTTYYIHWVRQAPGQGLEWMGWFFPGSGNTKYNEKFKGRVTITADTSTSTAYMELSSLRSEDTAVYYCAGSYYSYDVLDYWGQGTTVTVSS

SEQ ID NO: 212 - protein, 246 aa, synthetic construct
QVQLVQSGAEVKKPGSSVKVSCKASGYSFTTYYIHWVRQAPGQGLEWMGWFSPGSGNTKYNEKFKGRVTITADTSTSTAYMELSSLRSEDTAVYYCAVSYYSYDVLDYWGQGTTVTVSSGGGGSGGGGSGGGGSGGGGSDIQMTQSPSFLSASVGDRVTITCKASQNVGINVVWHQQKPGKAPKALIYSSSHRYSGVPSRFSGSGSGTEFTLTISSLQPEDFATYFCQQFKSYPLTFGQGTKLEIK

SEQ ID NO: 213 - protein, 119 aa, synthetic construct
QVQLVQSGAEVKKPGSSVKVSCKASGYSFTTYYIHWVRQAPGQGLEWMGWFSPGSGNTKYNEKFKGRVTITADTSTSTAYMELSSLRSEDTAVYYCAVSYYSYDVLDYWGQGTTVTVSS

SEQ ID NO: 214 - protein, 246 aa, synthetic construct
QVQLVQSGAEVKKPGSSVKVSCKASGYSFTTYYIHWVRQAPGQGLEWMGWFSPGSGNTKYNEKFKGRVTITADTSTSTAYMELSSLRSEDTAVYYCAGSYYSYDVLDYWGQGTTVTVSSGGGGSGGGGSGGGGSGGGGSDIQMTQSPSFLSASVGDRVTITCKASQNVGINVVWHQQKPGKAPKALIYSSSHRYSGVPSRFSGSGSGTEFTLTISSLQPEDFATYFCQQFKSYPLTFGQGTKLEIK

SEQ ID NO: 215 - protein, 119 aa, synthetic construct
QVQLVQSGAEVKKPGSSVKVSCKASGYSFTTYYIHWVRQAPGQGLEWMGWFSPGSGNTKYNEKFKGRVTITADTSTSTAYMELSSLRSEDTAVYYCAGSYYSYDVLDYWGQGTTVTVSS

SEQ ID NO: 216 - protein, 246 aa, synthetic construct
QVQLVQSGAEVKKPGSSVKVSCKASGYSFTTYYIHWVRQAPGQGLEWMGRIFPGSGNIKYNEKFKGRVTITADTSTSTAYMELSSLRSEDTAVYYCAGSYYSYDVLDYWGQGTTVTVSSGGGGSGGGGSGGGGSGGGGSDIQMTQSPSFLSASVGDRVTITCKASQNVGINVVWHQQKPGKAPKALIYSSSHRYSGVPSRFSGSGSGTEFTLTISSLQPEDFATYFCQQFKSYPLTFGQGTKLEIK

SEQ ID NO: 217 - protein, 119 aa, synthetic construct
QVQLVQSGAEVKKPGSSVKVSCKASGYSFTTYYIHWVRQAPGQGLEWMGRIFPGSGNIKYNEKFKGRVTITADTSTSTAYMELSSLRSEDTAVYYCAGSYYSYDVLDYWGQGTTVTVSS

SEQ ID NO: 218 - protein, 246 aa, synthetic construct
QVQLVQSGAEVKKPGSSVKVSCKASGYSFTTYYIHWVRQAPGQGLEWMGWFFPGSGNIKYNEKFKGRVTITADTSTSTAYMELSSLRSEDTAVYYCAGSIYSAGVLDYWGQGTTVTVSSGGGGSGGGGSGGGGSGGGGSDIQMTQSPSFLSASVGDRVTITCKASQNVGINVVWHQQKPGKAPKALIYSSSHRYSGVPSRFSGSGSGTEFTLTISSLQPEDFATYFCQQFKSYPLTFGQGTKLEIK

SEQ ID NO: 219 - protein, 119 aa, synthetic construct
QVQLVQSGAEVKKPGSSVKVSCKASGYSFTTYYIHWVRQAPGQGLEWMGWFFPGSGNIKYNEKFKGRVTITADTSTSTAYMELSSLRSEDTAVYYCAGSIYSAGVLDYWGQGTTVTVSS

SEQ ID NO: 220 - protein, 246 aa, synthetic construct
QVQLVQSGAEVKKPGSSVKVSCKASGYSFTLGYIHWVRQAPGQGLEWMGWFFPGSGNIKYNEKFKGRVTITADTSTSTAYMELSSLRSEDTAVYYCAGSYYSYDVLDYWGQGTTVTVSSGGGGSGGGGSGGGGSGGGGSDIQMTQSPSFLSASVGDRVTITCKASQNVGINVVWHQQKPGKAPKALIYSSSHRYSGVPSRFSGSGSGTEFTLTISSLQPEDFATYFCQQFKSYPLTFGQGTKLEIK

SEQ ID NO: 221 - protein, 119 aa, synthetic construct
QVQLVQSGAEVKKPGSSVKVSCKASGYSFTLGYIHWVRQAPGQGLEWMGWFFPGSGNIKYNEKFKGRVTITADTSTSTAYMELSSLRSEDTAVYYCAGSYYSYDVLDYWGQGTTVTVSS

SEQ ID NO: 222 - protein, 246 aa, synthetic construct
QVQLVQSGAEVKKPGSSVKVSCKASGYSFRLTYIHWVRQAPGQGLEWMGWFFPGSGNIKYNEKFKGRVTITADTSTSTAYMELSSLRSEDTAVYYCAGSYYSYDVLDYWGQGTTVTVSSGGGGSGGGGSGGGGSGGGGSDIQMTQSPSFLSASVGDRVTITCKASQNVGINVVWHQQKPGKAPKALIYSSSHRYSGVPSRFSGSGSGTEFTLTISSLQPEDFATYFCQQFKSYPLTFGQGTKLEIK

SEQ ID NO: 223 - protein, 119 aa, synthetic construct
QVQLVQSGAEVKKPGSSVKVSCKASGYSFRLTYIHWVRQAPGQGLEWMGWFFPGSGNIKYNEKFKGRVTITADTSTSTAYMELSSLRSEDTAVYYCAGSYYSYDVLDYWGQGTTVTVSS

SEQ ID NO: 224 - protein, 246 aa, synthetic construct
QVQLVQSGAEVKKPGSSVKVSCKASGYSFHNWYIHWVRQAPGQGLEWMGWFFPGSGNIKYNEKFKGRVTITADTSTSTAYMELSSLRSEDTAVYYCAGSYYSYDVLDYWGQGTTVTVSSGGGGSGGGGSGGGGSGGGGSDIQMTQSPSFLSASVGDRVTITCKASQNVGINVVWHQQKPGKAPKALIYSSSHRYSGVPSRFSGSGSGTEFTLTISSLQPEDFATYFCQQFKSYPLTFGQGTKLEIK

SEQ ID NO: 225 - protein, 119 aa, synthetic construct
QVQLVQSGAEVKKPGSSVKVSCKASGYSFHNWYIHWVRQAPGQGLEWMGWFFPGSGNIKYNEKFKGRVTITADTSTSTAYMELSSLRSEDTAVYYCAGSYYSYDVLDYWGQGTTVTVSS

SEQ ID NO: 226-227 - skipped (2 entries)

SEQ ID NO: 228 - protein, 449 aa, synthetic construct
QVQLVQSGAEVKKPGSSVKVSCKASGHDFRLTYIHWVRQAPGQGLEWMGRVSAGSGNVKYNEKFKGRVTITADTSTSTAYMELSSLRSEDTAVYYCAVSYYSYDVLDYWGQGTTVTVSSASTKGPSVFPLAPSSKSTSGGTAALGCLVKDYFPEPVTVSWNSGALTSGVHTFPAVLQSSGLYSLSSVVTVPSSSLGTQTYICNVNHKPSNTKVDKRVEPKSCDKTHTCPPCPAPELLGGPSVFLFPPKPKDTLMISRTPEVTCVVVDVSHEDPEVKFNWYVDGVEVHNAKTKPREEQYASTYRVVSVLTVLHQDWLNGKEYKCKVSNKALPAPIEKTISKAKGQPREPQVCTLPPSREEMTKNQVSLSCAVKGFYPSDIAVEWESNGQPENNYKTTPPVLDSDGSFFLVSKLTVDKSRWQQGNVFSCSVMHEALHNHYTQKSLSLSPGK

SEQ ID NO: 229 - protein, 5 aa, synthetic construct
LTYIH

SEQ ID NO: 230 - protein, 107 aa, synthetic construct
  VARIANT 30: note = G, E, A or D
  VARIANT 31: note = N or D
  VARIANT 32: note = R or K
  VARIANT 36: note = Y or H
  VARIANT 56: note = K or S
DIQMTQSPSFLSASVGDRVTITCKASQNVXXXVAWXQQKPGKAPKALIYSSSHRYXGVPSRFSGSGSGTEFTLTISSLQPEDFATYFCQQFKSYPLTFGQGTKLEIK

SEQ ID NO: 231 - protein, 119 aa, synthetic construct
  VARIANT 27: note = H, T, G or Y
  VARIANT 28: note = D, T or S
  VARIANT 30: note = H, R, D, K or T
  VARIANT 31: note = L, D, K, T or N
  VARIANT 32: note = W, F, T, I, Y or G
  VARIANT 50: note = R or W
  VARIANT 51: note = V, I or F
  VARIANT 52: note = F, S or Y
  VARIANT 53: note = A or P
  VARIANT 57: note = N or S
  VARIANT 58: note = T, V, Y or I
  VARIANT 59: note = K or R
  VARIANT 98: note = G or V
  VARIANT 100: note = Y or I
  VARIANT 103: note = Y or A
  VARIANT 104: note = D or G
QVQLVQSGAEVKKPGSSVKVSCKASGXXFXXXYIHWVRQAPGQGLEWMGXXXXGSGXXXYNEKFKGRVTITADTSTSTAYMELSSLRSEDTAVYYCAXSXYSXXVLDYWGQGTTVTVSS

SEQ ID NO: 232 - protein, 107 aa, synthetic construct
DIQMTQTTSSLSASLGDRVTISCSASQGISNYLNWYQQKPDGTVKLLIYYTSSLHSGVPSRFSGSGSGTDYSLTISNLEPEDIATYYCQQYSKLPRTFGGGTKVEIK

SEQ ID NO: 233 - protein, 120 aa, synthetic construct
QVQLKESGPGLVAPSQSLSITCTVSGFSLTAYGVNWVRQPPGKGLEWLGMIWGDGNTDYNSALKSRLSISKDNSKSQVFLKMNSLQTDDTARYYCARDRVTATLYAMDYWGQGTSVTVSS

SEQ ID NO: 234 - protein, 7 aa, synthetic construct
FRLTYIH

SEQ ID NO: 235 - protein, 448 aa, synthetic construct
ITCPPPMSVEHADIWVKSYSLYSRERYICNSGFKRKAGTSSLTECVLNKATNVAHWTTPSLKCIRDPALVHQRPAPPSGGSGGGGSGGGSGGGGSGGNWVNVISDLKKIEDLIQSMHIDATLYTESDVHPSCKVTAMKCFLLELQVISLESGDASIHDTVENLIILANNSLSSNGNVTESGCKECEELEEKNIKEFLQSFVHIVQMFINTSGGGGSGGGGSDKTHTCPPCPAPELLGGPSVFLFPPKPKDTLMISRTPEVTCVVVDVSHEDPEVKFNWYVDGVEVHNAKTKPREEQYASTYRVVSVLTVLHQDWLNGKEYKCKVSNKALPAPIEKTISKAKGQPREPQVYTLPPCREEMTKNQVSLWCLVKGFYPSDIAVEWESNGQPENNYKTTPPVLDSDGSFFLYSKLTVDKSRWQQGNVFSCSVMHEALHNHYTQKSLSLSPGK

SEQ ID NO: 236 - protein, 77 aa, synthetic construct
ITCPPPMSVEHADIWVKSYSLYSRERYICNSGFKRKAGTSSLTECVLNKATNVAHWTTPSLKCIRDPALVHQRPAPP

SEQ ID NO: 237 - protein, 10 aa, synthetic construct
GGGGSGGGGS

SEQ ID NO: 238 - protein, 114 aa, synthetic construct
NWVNVISDLKKIEDLIQSMHIDATLYTESDVHPSCKVTAMKCFLLELQVISLESGDASIHDTVENLIILANNSLSSNGNVTESGCKECEELEEKNIKEFLQSFVHIVQMFINTS

SEQ ID NO: 239 - protein, 214 aa, synthetic construct
DIQMTQSPSFLSASVGDRVTITCKASQNVADRVVWHQQKPGKAPKALIYSSSHRYKGVPSRFSGSGSGTEFTLTISSLQPEDFATYFCQQFKSYPLTFGQGTKLEIKRTVAAPSVFIFPPSDEQLKSGTASVVCLLNNFYPREAKVQWKVDNALQSGNSQESVTEQDSKDSTYSLSSTLTLSKADYEKHKVYACEVTHQGLSSPVTKSFNRGEC

SEQ ID NO: 240 - protein, 351 aa, synthetic construct
NWVNVISDLKKIEDLIQSMHIDATLYTESDVHPSCKVTAMKCFLLELQVISLESGDASIHDTVENLIILANNSLSSNGNVTESGCKECEELEEKNIKEFLQSFVHIVQMFINTSGGGGSGGGGSDKTHTCPPCPAPELLGGPSVFLFPPKPKDTLMISRTPEVTCVVVDVSHEDPEVKFNWYVDGVEVHNAKTKPREEQYASTYRVVSVLTVLHQDWLNGKEYKCKVSNKALPAPIEKTISKAKGQPREPQVYTLPPCREEMTKNQVSLWCLVKGFYPSDIAVEWESNGQPENNYKTTPPVLDSDGSFFLYSKLTVDKSRWQQGNVFSCSVMHEALHNHYTQKSLSLSPGK

SEQ ID NO: 241 - protein, 370 aa, synthetic construct
APTSSSTKKTQLQLEHLLLDLQMILNGINNYKNPKLTRMLTFKFYMPKKATELKHLQCLEEELKPLEEVLNLAQSKNFHLRPRDLISNINVIVLELKGSETTFMCEYADETATIVEFLNRWITFAQSIISTLTGGGGSGGGGSDKTHTCPPCPAPELLGGPSVFLFPPKPKDTLMISRTPEVTCVVVDVSHEDPEVKFNWYVDGVEVHNAKTKPREEQYASTYRVVSVLTVLHQDWLNGKEYKCKVSNKALPAPIEKTISKAKGQPREPQVYTLPPCREEMTKNQVSLWCLVKGFYPSDIAVEWESNGQPENNYKTTPPVLDSDGSFFLYSKLTVDKSRWQQGNVFSCSVMHEALHNHYTQKSLSLSPGK

SEQ ID NO: 242 - protein, 133 aa, synthetic construct
APTSSSTKKTQLQLEHLLLDLQMILNGINNYKNPKLTRMLTFKFYMPKKATELKHLQCLEEELKPLEEVLNLAQSKNFHLRPRDLISNINVIVLELKGSETTFMCEYADETATIVEFLNRWITFAQSIISTLT

SEQ ID NO: 243 - protein, 20 aa, synthetic construct
SGGSGGGGSGGGSGGGGSGG

SEQ ID NO: 244 - protein, 452 aa, synthetic construct
QVQLQQSGTELMKPGASVKISCKASGYTFSNYWIEWIKQRPGHGLEWVGEILPGAGPTNYNEKFKGKATFTADSSSNTAYMQLSSLTSEDSAVYYCARTDYDYDWFAYWGQGTLVTVSAAKTTAPSVYPLAPVSGDTTGSSVTLGCLVKGYFPEPVTLTWNSGSLSSGVHTFPAVLQSDLYTLSSSVTVTSSTWPSQSITCNVAHPASSTKVDKKIEPKSCDKTHTCPPCPAPNAAGGPSVFIFPPKIKDVLMISLSPIVTCVVVDVSEDDPDVQISWFVNNVEVHTAQTQTHREDYNSTLRVVSALPIQHQDWMSGKEFKCKVNNKDLGAPIERTISKPKGSVRAPQVCVLPPPEEEMTKKQVTLSCAVTDFMPEDIYVEWTNNGKTELNYKNTEPVLDSDGSYFMVSKLRVEKKNWVERNSYSCSVVHEGLHNHHTTKSFSRTPGKEPEA

SEQ ID NO: 245 - protein, 448 aa, synthetic construct
QVQLQQSGTELMKPGASVKISCKASGYTFSNYWIEWIKQRPGHGLEWVGEILPGAGPTNYNEKFKGKATFTADSSSNTAYMQLSSLTSEDSAVYYCARTDYDYDWFAYWGQGTLVTVSAAKTTAPSVYPLAPVSGDTTGSSVTLGCLVKGYFPEPVTLTWNSGSLSSGVHTFPAVLQSDLYTLSSSVTVTSSTWPSQSITCNVAHPASSTKVDKKIEPKSCDKTHTCPPCPAPNAAGGPSVFIFPPKIKDVLMISLSPIVTCVVVDVSEDDPDVQISWFVNNVEVHTAQTQTHREDYNSTLRVVSALPIQHQDWMSGKEFKCKVNNKDLGAPIERTISKPKGSVRAPQVCVLPPPEEEMTKKQVTLSCAVTDFMPEDIYVEWTNNGKTELNYKNTEPVLDSDGSYFMVSKLRVEKKNWVERNSYSCSVVHEGLHNHHTTKSFSRTPGK

SEQ ID NO: 246 - protein, 192 aa, synthetic construct
QVQLQQSGTELMKPGASVKISCKASGYTFSNYWIEWIKQRPGHGLEWVGEILPGAGPTNYNEKFKGKATFTADSSSNTAYMQLSSLTSEDSAVYYCARTDYDYDWFAYWGQGTLVTVSAAKTTAPSVYPLAPVSGDTTGSSVTLGCLVKGYFPEPVTLTWNSGSLSSGVHTFPAVLQSDLYTLSSSVTVTSS

SEQ ID NO: 247 - protein, 10 aa, synthetic construct
GYTFSNYWIE

SEQ ID NO: 248 - protein, 17 aa, synthetic construct
EILPGAGPTNYNEKFKG

SEQ ID NO: 249 - protein, 10 aa, synthetic construct
TDYDYDWFAY

SEQ ID NO: 250 - protein, 260 aa, synthetic construct
TWPSQSITCNVAHPASSTKVDKKIEPKSCDKTHTCPPCPAPNAAGGPSVFIFPPKIKDVLMISLSPIVTCVVVDVSEDDPDVQISWFVNNVEVHTAQTQTHREDYNSTLRVVSALPIQHQDWMSGKEFKCKVNNKDLGAPIERTISKPKGSVRAPQVYVLPPPEEEMTKKQVTLTCMVTDFMPEDIYVEWTNNGKTELNYKNTEPVLDSDGSYFMYSKLRVEKKNWVERNSYSCSVVHEGLHNHHTTKSFSRTPGKEPEA

SEQ ID NO: 251 - protein, 368 aa, synthetic construct
DIVMSQSPSSLAVSVGEKVTMSCKSSQSLLYSGNQKNYLAWYQQKPGQSPKLLIYWASTRESGVPDRFTGSGSGTDFTLTINSVKAEDLTVYYCQQYYGYPRTFGGGTKVEIKRADAAPTVSIFPPSSEQLTSGGASVVCFLNNFYPKDINVKWKIDGSERQNGVLNSWTDQDSKDSTYSMSSTLTLTKDEYERHNSYTCEATHKTSTSPIVKSFNRNECGGGGSGGGGSGGGGSAPTSSSTKKTQLQLEHLLLDLQMILNGINNYKNPKLTRMLTFKFYMPKKATELKHLQCLEEELKPLEEVLNLAQSKNFHLRPRDLISNINVIVLELKGSETTFMCEYADETATIVEFLNRWITFCQSIISTLT

SEQ ID NO: 252 - protein, 113 aa, synthetic construct
DIVMSQSPSSLAVSVGEKVTMSCKSSQSLLYSGNQKNYLAWYQQKPGQSPKLLIYWASTRESGVPDRFTGSGSGTDFTLTINSVKAEDLTVYYCQQYYGYPRTFGGGTKVEIK

SEQ ID NO: 253 - protein, 11 aa, synthetic construct
KSSQSLLYSGN

SEQ ID NO: 254 - protein, 8 aa, synthetic construct
PKLLIYWA

SEQ ID NO: 255 - protein, 9 aa, synthetic construct
QQYYGYPRT

SEQ ID NO: 256 - protein, 107 aa, synthetic construct
RADAAPTVSIFPPSSEQLTSGGASVVCFLNNFYPKDINVKWKIDGSERQNGVLNSWTDQDSKDSTYSMSSTLTLTKDEYERHNSYTCEATHKTSTSPIVKSFNRNEC

SEQ ID NO: 257 - protein, 452 aa, synthetic construct
QVQLQQSGTELMKPGASVKISCKASGYTFSNYWIEWIKQRPGHGLEWVGEILPGAGPTNYNEKFKGKATFTADSSSNTAYMQLSSLTSEDSAVYYCARTDYDYDWFAYWGQGTLVTVSAAKTTAPSVYPLAPVSGDTTGSSVTLGCLVKGYFPEPVTLTWNSGSLSSGVHTFPAVLQSDLYTLSSSVTVTSSTWPSQSITCNVAHPASSTKVDKKIEPKSCDKTHTCPPCPAPNAAGGPSVFIFPPKIKDVLMISLSPIVTCVVVDVSEDDPDVQISWFVNNVEVHTAQTQTHREDYNSTLRVVSALPIQHQDWMSGKEFKCKVNNKDLGAPIERTISKPKGSVRAPQVYVLPPPEEEMTKKQVTLTCMVTDFMPEDIYVEWTNNGKTELNYKNTEPVLDSDGSYFMYSKLRVEKKNWVERNSYSCSVVHEGLHNHHTTKSFSRTPGKEPEA

SEQ ID NO: 258 - protein, 15 aa, synthetic construct
GGGGSGGGGSGGGGS

SEQ ID NO: 259-263 - skipped (5 entries)

SEQ ID NO: 264 - protein, 256 aa, synthetic construct
TWPSQSITCNVAHPASSTKVDKKIEPKSCDKTHTCPPCPAPNAAGGPSVFIFPPKIKDVLMISLSPIVTCVVVDVSEDDPDVQISWFVNNVEVHTAQTQTHREDYNSTLRVVSALPIQHQDWMSGKEFKCKVNNKDLGAPIERTISKPKGSVRAPQVCVLPPPEEEMTKKQVTLSCAVTDFMPEDIYVEWTNNGKTELNYKNTEPVLDSDGSYFMVSKLRVEKKNWVERNSYSCSVVHEGLHNHHTTKSFSRTPGK

SEQ ID NO: 265 - protein, 4 aa, synthetic construct
EPEA

SEQ ID NO: 266 - protein, 383 aa, synthetic construct
APTSSSTKKTQLQLEHLLLDLQMILNGINNYKNPKLTRMLTFKFYMPKKATELKHLQCLEEELKPLEEVLNLAQSKNFHLRPRDLISNINVIVLELKGSETTFMCEYADETATIVEFLNRWITFCQSIISTLTGGGGSGGGGSDKTHTCPPCPAPNAAGGPSVFIFPPKIKDVLMISLSPIVTCVVVDVSEDDPDVQISWFVNNVEVHTAQTQTHREDYNSTLRVVSALPIQHQDWMSGKEFKCKVNNKDLGAPIERTISKPKGSVRAPQVYVLPPCEEEMTKKQVTLWCMVTDFMPEDIYVEWTNNGKTELNYKNTEPVLDSDGSYFMYSKLRVEKKNWVERNSYSCSVVHEGLHNHHTTKSFSRTPGKGGGGSHHHHHHHH

SEQ ID NO: 267 - protein, 370 aa, synthetic construct
APTSSSTKKTQLQLEHLLLDLQMILNGINNYKNPKLTRMLTFKFYMPKKATELKHLQCLEEELKPLEEVLNLAQSKNFHLRPRDLISNINVIVLELKGSETTFMCEYADETATIVEFLNRWITFCQSIISTLTGGGGSGGGGSDKTHTCPPCPAPNAAGGPSVFIFPPKIKDVLMISLSPIVTCVVVDVSEDDPDVQISWFVNNVEVHTAQTQTHREDYNSTLRVVSALPIQHQDWMSGKEFKCKVNNKDLGAPIERTISKPKGSVRAPQVYVLPPCEEEMTKKQVTLWCMVTDFMPEDIYVEWTNNGKTELNYKNTEPVLDSDGSYFMYSKLRVEKKNWVERNSYSCSVVHEGLHNHHTTKSFSRTPGK

SEQ ID NO: 268 - protein, 133 aa, synthetic construct [sequence omitted]

SEQ ID NO: 269 - protein, 227 aa, synthetic construct
DKTHTCPPCPAPNAAGGPSVFIFPPKIKDVLMISLSPIVTCVVVDVSEDDPDVQISWFVNNVEVHTAQTQTHREDYNSTLRVVSALPIQHQDWMSGKEFKCKVNNKDLGAPIERTISKPKGSVRAPQVYVLPPCEEEMTKKQVTLWCMVTDFMPEDIYVEWTNNGKTELNYKNTEPVLDSDGSYFMYSKLRVEKKNWVERNSYSCSVVHEGLHNHHTTKSFSRTPGK

SEQ ID NO: 270 - protein, 13 aa, synthetic construct
GGGGSHHHHHHHH

SEQ ID NO: 271 - protein, 220 aa, synthetic construct
DIVMSQSPSSLAVSVGEKVTMSCKSSQSLLYSGNQKNYLAWYQQKPGQSPKLLIYWASTRESGVPDRFTGSGSGTDFTLTINSVKAEDLTVYYCQQYYGYPRTFGGGTKVEIKRADAAPTVSIFPPSSEQLTSGGASVVCFLNNFYPKDINVKWKIDGSERQNGVLNSWTDQDSKDSTYSMSSTLTLTKDEYERHNSYTCEATHKTSTSPIVKSFNRNEC

SEQ ID NO: 272 - protein, 389 aa, synthetic construct
DCDIEGKDGKQYESVLMVSIDQLLDSMKEIGSNCLNNEFNFFKRHICDANKEGMFLFRAARKLRQFLKMNSTGDFDLHLLKVSEGTTILLNCTGQVKGRKPAALGEAQPTKSLEENKSLKEQKKLNDLCFLKRLLQEIKTCWNKILMGTKEHGGGGSGGGGSDKTHTCPPCPAPELLGGPSVFLFPPKPKDTLMISRTPEVTCVVVDVSHEDPEVKFNWYVDGVEVHNAKTKPREEQYASTYRVVSVLTVLHQDWLNGKEYKCKVSNKALPAPIEKTISKAKGQPREPQVYTLPPCREEMTKNQVSLWCLVKGFYPSDIAVEWESNGQPENNYKTTPPVLDSDGSFFLYSKLTVDKSRWQQGNVFSCSVMHEALHNHYTQKSLSLSPGK

SEQ ID NO: 273 - protein, 152 aa, synthetic construct
DCDIEGKDGKQYESVLMVSIDQLLDSMKEIGSNCLNNEFNFFKRHICDANKEGMFLFRAARKLRQFLKMNSTGDFDLHLLKVSEGTTILLNCTGQVKGRKPAALGEAQPTKSLEENKSLKEQKKLNDLCFLKRLLQEIKTCWNKILMGTKEH

SEQ ID NO: 274 - protein, 133 aa, synthetic construct [sequence omitted]

SEQ ID NO: 275 - protein, 755 aa, synthetic construct
IWELKKDVYVVELDWYPDAPGEMVVLTCDTPEEDGITWTLDQSSEVLGSGKTLTIQVKEFGDAGQYTCHKGGEVLSHSLLLLHKKEDGIWSTDILKDQKEPKNKTFLRCEAKNYSGRFTCWWLTTISTDLTFSVKSSRGSSDPQGVTCGAATLSAERVRGDNKEYEYSVECQEDSACPAAEESLPIEVMVDAVHKLKYENYTSSFFIRDIIKPDPPKNLQLKPLKNSRQVEVSWEYPDTWSTPHSYFSLTFCVQVQGKSKREKKDRVFTDKTSATVICRKNASISVRAQDRYYSSSWSEWASVPCSGGGGSGGGGSGGGGSRNLPVATPDPGMFPCLHHSQNLLRAVSNMLQKARQTLEFYPCTSEEIDHEDITKDKTSTVEACLPLELTKNESCLNSRETSFITNGSCLASRKTSFMMALCLSSIYEDLKMYQVEFKTMNAKLLMDPKRQIFLDQNMLAVIDELMQALNFNSETVPQKSSLEEPDFYKTKIKLCILLHAFRIRAVTIDRVMSYLNASGGGGSGGGGSDKTHTCPPCPAPELLGGPSVFLFPPKPKDTLMISRTPEVTCVVVDVSHEDPEVKFNWYVDGVEVHNAKTKPREEQYASTYRVVSVLTVLHQDWLNGKEYKCKVSNKALPAPIEKTISKAKGQPREPQVYTLPPCREEMTKNQVSLWCLVKGFYPSDIAVEWESNGQPENNYKTTPPVLDSDGSFFLYSKLTVDKSRWQQGNVFSCSVMHEALHNHYTQKSLSLSPGK

SEQ ID NO: 276 - protein, 518 aa, synthetic construct
IWELKKDVYVVELDWYPDAPGEMVVLTCDTPEEDGITWTLDQSSEVLGSGKTLTIQVKEFGDAGQYTCHKGGEVLSHSLLLLHKKEDGIWSTDILKDQKEPKNKTFLRCEAKNYSGRFTCWWLTTISTDLTFSVKSSRGSSDPQGVTCGAATLSAERVRGDNKEYEYSVECQEDSACPAAEESLPIEVMVDAVHKLKYENYTSSFFIRDIIKPDPPKNLQLKPLKNSRQVEVSWEYPDTWSTPHSYFSLTFCVQVQGKSKREKKDRVFTDKTSATVICRKNASISVRAQDRYYSSSWSEWASVPCSGGGGSGGGGSGGGGSRNLPVATPDPGMFPCLHHSQNLLRAVSNMLQKARQTLEFYPCTSEEIDHEDITKDKTSTVEACLPLELTKNESCLNSRETSFITNGSCLASRKTSFMMALCLSSIYEDLKMYQVEFKTMNAKLLMDPKRQIFLDQNMLAVIDELMQALNFNSETVPQKSSLEEPDFYKTKIKLCILLHAFRIRAVTIDRVMSYLNAS

SEQ ID NO: 277 - protein, 305 aa, synthetic construct
IWELKKDVYVVELDWYPDAPGEMVVLTCDTPEEDGITWTLDQSSEVLGSGKTLTIQVKEFGDAGQYTCHKGGEVLSHSLLLLHKKEDGIWSTDILKDQKEPKNKTFLRCEAKNYSGRFTCWWLTTISTDLTFSVKSSRGSSDPQGVTCGAATLSAERVRGDNKEYEYSVECQEDSACPAAEESLPIEVMVDAVHKLKYENYTSSFFIRDIIKPDPPKNLQLKPLKNSRQVEVSWEYPDTWSTPHSYFSLTFCVQVQGKSKREKKDRVFTDKTSATVICRKNASISVRAQDRYYSSSWSEWASVPC

SEQ ID NO: 278 - protein, 16 aa, synthetic construct
SGGGGSGGGGSGGGGS

SEQ ID NO: 279 - protein, 197 aa, synthetic construct
RNLPVATPDPGMFPCLHHSQNLLRAVSNMLQKARQTLEFYPCTSEEIDHEDITKDKTSTVEACLPLELTKNESCLNSRETSFITNGSCLASRKTSFMMALCLSSIYEDLKMYQVEFKTMNAKLLMDPKRQIFLDQNMLAVIDELMQALNFNSETVPQKSSLEEPDFYKTKIKLCILLHAFRIRAVTIDRVMSYLNAS

SEQ ID NO: 280-287 - skipped (8 entries)

SEQ ID NO: 288 - protein, 370 aa, synthetic construct
QGQDRHMIRMRQLIDIVDQLKNYVNDLVPEFLPAPEDVETNCEWSAFSCFQKAQLKSANTGNNERIINVSIKKLKRKPPSTNAGRRQKHRLTCPSCDSYEKKPPKEFLERFKSLLQKMIHQHLSSRTHGSEDSGGGGSGGGGSDKTHTCPPCPAPELLGGPSVFLFPPKPKDTLMISRTPEVTCVVVDVSHEDPEVKFNWYVDGVEVHNAKTKPREEQYASTYRVVSVLTVLHQDWLNGKEYKCKVSNKALPAPIEKTISKAKGQPREPQVYTLPPCREEMTKNQVSLWCLVKGFYPSDIAVEWESNGQPENNYKTTPPVLDSDGSFFLYSKLTVDKSRWQQGNVFSCSVMHEALHNHYTQKSLSLSPGK

SEQ ID NO: 289-299 - skipped (11 entries)

SEQ ID NO: 300 - protein, 447 aa, synthetic construct
QVQLVQSGAEVKKPGASVKVSCKASGFNIKSAYMHWVRQAPGQEPGCMGRIDPATGKTKYAPKFQARVTMTADTSINTAYTELSSLRSEDTATYYCARSLNWDYGLDYWGQGTLVTVSSASTKGPSVFPLAPSSKSTSGGTAALGCLVKDYFPEPVTVSWNSGALTSGVHTFPAVLQSSGLYSLSSVVTVPSSSLGTQTYICNVNHKPSNTKVDKRVEPKSCDKTHTCPPCPAPELLGGPSVFLFPPKPKDTLMISRTPEVTCVVVDVSHEDPEVKFNWYVDGVEVHNAKTKPREEQYASTYRVVSVLTVLHQDWLNGKEYKCKVSNKALPAPIEKTISKAKGQPREPQVCTLPPSREEMTKNQVSLSCAVKGFYPSDIAVEWESNGQPENNYKTTPPVLDSDGSFFLVSKLTVDKSRWQQGNVFSCSVMHEALHNHYTQKSLSLSP

SEQ ID NO: 301 - protein, 447 aa, synthetic construct
QVQLVQSGAEVKKPGASVKVSCKASGFNIKSAYMHWVRQAPGQGLEWMGRIDPATGKTKYAPKFQARVTMTADTSTNTAYMELSSLRSEDTAVYYCARSLNWDYGLDYWGQGTLVTVSSASTKGPSVFPLAPSSKSTSGGTAALGCLVKDYFPEPVTVSWNSGALTSGVHTFPAVLQSSGLYSLSSVVTVPSSSLGTQTYICNVNHKPSNTKVDKRVEPKSCDKTHTCPPCPAPELLGGPSVFLFPPKPKDTLMISRTPEVTCVVVDVSHEDPEVKFNWYVDGVEVHNAKTKPREEQYASTYRVVSVLTVLHQDWLNGKEYKCKVSNKALPAPIEKTISKAKGQPREPQVCTLPPSREEMTKNQVSLSCAVKGFYPSDIAVEWESNGQPENNYKTTPPVLDSDGSFFLVSKLTVDKSRWQQGNVFSCSVMHEALHNHYTQKSLSLSP

SEQ ID NO: 302 - protein, 447 aa, synthetic construct
QVQLVQSGAEVKKPGSSVKVSCKASGHDFRLTYIHWVRQAPGQGLEWMGRVSAGSGNVKYNEKFKGRVTITADTSTSTAYMELSSLRSEDTAVYYCAVSYYSYDVLDYWGQGTTVTVSSASTKGPSVFPLAPSSKSTSGGTAALGCLVKDYFPEPVTVSWNSGALTSGVHTFPAVLQSSGLYSLSSVVTVPSSSLGTQTYICNVNHKPSNTKVDKRVEPKSCDKTHTCPPCPAPELLGGPSVFLFPPKPKDTLMISRTPEVTCVVVDVSHEDPEVKFNWYVDGVEVHNAKTKPREEQYASTYRVVSVLTVLHQDWLNGKEYKCKVSNKALPAPIEKTISKAKGQPREPQVCTLPPSREEMTKNQVSLSCAVKGFYPSDIAVEWESNGQPENNYKTTPPVLDSDGSFFLVSKLTVDKSRWQQGNVFSCSVMHEALHNHYTQKSLSLSP

SEQ ID NO: 303 - protein, 449 aa, synthetic construct
QIQLQQSGPEVVKPGASVQISCKASGYTFSGSWMNWVKQRPGKGLEWIGRIYPGDGDTDYSGKFKGRATLTADKSSSTAYMRLSSLTSEDSAVYFCARSGYFNYVPVFDYWGQGTTLSVSSASTKGPSVFPLAPSSKSTSGGTAALGCLVKDYFPEPVTVSWNSGALTSGVHTFPAVLQSSGLYSLSSVVTVPSSSLGTQTYICNVNHKPSNTKVDKRVEPKSCDKTHTCPPCPAPELLGGPSVFLFPPKPKDTLMISRTPEVTCVVVDVSHEDPEVKFNWYVDGVEVHNAKTKPREEQYASTYRVVSVLTVLHQDWLNGKEYKCKVSNKALPAPIEKTISKAKGQPREPQVCTLPPSREEMTKNQVSLSCAVKGFYPSDIAVEWESNGQPENNYKTTPPVLDSDGSFFLVSKLTVDKSRWQQGNVFSCSVMHEALHNHYTQKSLSLSP

SEQ ID NO: 304 - protein, 448 aa, synthetic construct
NVQLQESGPGLVKPSQSLSLTCSVAGYSITSGYFWNWIRQFPGNKLEWMGYISYDGSNNYNPSLKNRISITRDTSKNQFFLKLNSVTTEDTATYYCASPSPGTGYAVDYWGQGTSVTVSSASTKGPSVFPLAPSSKSTSGGTAALGCLVKDYFPEPVTVSWNSGALTSGVHTFPAVLQSSGLYSLSSVVTVPSSSLGTQTYICNVNHKPSNTKVDKRVEPKSCDKTHTCPPCPAPELLGGPSVFLFPPKPKDTLMISRTPEVTCVVVDVSHEDPEVKFNWYVDGVEVHNAKTKPREEQYASTYRVVSVLTVLHQDWLNGKEYKCKVSNKALPAPIEKTISKAKGQPREPQVCTLPPSREEMTKNQVSLSCAVKGFYPSDIAVEWESNGQPENNYKTTPPVLDSDGSFFLVSKLTVDKSRWQQGNVFSCSVMHEALHNHYTQKSLSLSP

SEQ ID NO: 305 - protein, 449 aa, synthetic construct
QVQLQQPGAELVRPGASVKLSCKASGYTFTNYWMNWVKQRPGQGLEWIGMIHPSDSATRLNQKFKDKATLTVDKSSSTAYMQLSSPTSEDSAVYYCARWAYYGNLYAIDYWGQGTSVTVSSAKTTAPSVYPLAPVCGDTTGSSVTLGCLVKGYFPEPVTLTWNSGSLSSGVHTFPAVLQSDLYTLSSSVTVTSSTWPSQSITCNVAHPASSTKVDKKIEPRGPTIKPCPPCKCPAPNAAGGPSVFIFPPKIKDVLMISLSPIVTCVVVDVSEDDPDVQISWFVNNVEVHTAQTQTHREDYNSTLRVVSALPIQHQDWMSGKEFKCKVNNKDLGAPIERTISKPKGSVRAPQVCVLPPPEEEMTKKQVTLSCAVTDFMPEDIYVEWTNNGKTELNYKNTEPVLDSDGSYFMVSKLRVEKKNWVERNSYSCSVVHEGLHNHHTTKSFSRTP

SEQ ID NO: 306 - protein, 369 aa, synthetic construct
APTSSSTKKTQLQLEHLLLDLQMILNGINNYKNPKLTRMLTFKFYMPKKATELKHLQCLEEELKPLEEVLNLAQSKNFHLRPRDLISNINVIVLELKGSETTFMCEYADETATIVEFLNRWITFCQSIISTLTGGGGSGGGGSTIKPCPPCKCPAPNAAGGPSVFIFPPKIKDVLMISLSPIVTCVVVDVSEDDPDVQISWFVNNVEVHTAQTQTHREDYNSTLRVVSALPIQHQDWMSGKEFKCKVNNKDLGAPIERTISKPKGSVRAPQVYVLPPCEEEMTKKQVTLWCMVTDFMPEDIYVEWTNNGKTELNYKNTEPVLDSDGSYFMYSKLRVEKKNWVERNSYSCSVVHEGLHNHHTTKSFSRTP

SEQ ID NO: 307 - protein, 328 aa, synthetic construct
AKTTAPSVYPLAPVCGDTTGSSVTLGCLVKGYFPEPVTLTWNSGSLSSGVHTFPAVLQSDLYTLSSSVTVTSSTWPSQSITCNVAHPASSTKVDKKIEPRGPTIKPCPPCKCPAPNAAGGPSVFIFPPKIKDVLMISLSPIVTCVVVDVSEDDPDVQISWFVNNVEVHTAQTQTHREDYNSTLRVVSALPIQHQDWMSGKEFKCKVNNKDLGAPIERTISKPKGSVRAPQVCVLPPPEEEMTKKQVTLSCAVTDFMPEDIYVEWTNNGKTELNYKNTEPVLDSDGSYFMVSKLRVEKKNWVERNSYSCSVVHEGLHNHHTTKSFSRTP

SEQ ID NO: 308 - protein, 226 aa, synthetic construct
TIKPCPPCKCPAPNAAGGPSVFIFPPKIKDVLMISLSPIVTCVVVDVSEDDPDVQISWFVNNVEVHTAQTQTHREDYNSTLRVVSALPIQHQDWMSGKEFKCKVNNKDLGAPIERTISKPKGSVRAPQVCVLPPPEEEMTKKQVTLSCAVTDFMPEDIYVEWTNNGKTELNYKNTEPVLDSDGSYFMVSKLRVEKKNWVERNSYSCSVVHEGLHNHHTTKSFSRTP

SEQ ID NO: 309 - protein, 226 aa, synthetic construct
TIKPCPPCKCPAPNAAGGPSVFIFPPKIKDVLMISLSPIVTCVVVDVSEDDPDVQISWFVNNVEVHTAQTQTHREDYNSTLRVVSALPIQHQDWMSGKEFKCKVNNKDLGAPIERTISKPKGSVRAPQVYVLPPCEEEMTKKQVTLWCMVTDFMPEDIYVEWTNNGKTELNYKNTEPVLDSDGSYFMYSKLRVEKKNWVERNSYSCSVVHEGLHNHHTTKSFSRTP

SEQ ID NO: 310 - protein, 444 aa, synthetic construct
QIQLVQSGPELKKPGETVKISCKASGYTFTDYSMHWMKQAPGKGLKWMAWINTDTGEPTYADDFKGRFAFSLETSVSTAYLQINNLKNEDTATYFCARSSRRFDYWGQGTTLTVSSASTKGPSVFPLAPSSKSTSGGTAALGCLVKDYFPEPVTVSWNSGALTSGVHTFPAVLQSSGLYSLSSVVTVPSSSLGTQTYICNVNHKPSNTKVDKRVEPKSCDKTHTCPPCPAPELLGGPSVFLFPPKPKDTLMISRTPEVTCVVVDVSHEDPEVKFNWYVDGVEVHNAKTKPREEQYASTYRVVSVLTVLHQDWLNGKEYKCKVSNKALPAPIEKTISKAKGQPREPQVCTLPPSREEMTKNQVSLSCAVKGFYPSDIAVEWESNGQPENNYKTTPPVLDSDGSFFLVSKLTVDKSRWQQGNVFSCSVMHEALHNHYTQKSLSLSP

SEQ ID NO: 311 - protein, 447 aa, synthetic construct
ITCPPPMSVEHADIWVKSYSLYSRERYICNSGFKRKAGTSSLTECVLNKATNVAHWTTPSLKCIRDPALVHQRPAPPSGGSGGGGSGGGSGGGGSGGGNWVNVISDLKKIEDLIQSMHIDATLYTESDVHPSCKVTAMKCFLLELQVISLESGDASIHDTVENLIILANNSLSSNGNVTESGCKECEELEEKNIKEFLQSFVHIVQMFINTSGGGGSGGGGSDKTHTCPPCPAPELLGGPSVFLFPPKPKDTLMISRTPEVTCVVVDVSHEDPEVKFNWYVDGVEVHNAKTKPREEQYASTYRVVSVLTVLHQDWLNGKEYKCKVSNKALPAPIEKTISKAKGQPREPQVYTLPPCREEMTKNQVSLWCLVKGFYPSDIAVEWESNGQPENNYKTTPPVLDSDGSFFLYSKLTVDKSRWQQGNVFSCSVMHEALHNHYTQKSLSLSP

SEQ ID NO: 312 - protein, 447 aa, synthetic construct
ITCPPPMSVEHADIWVKSYSLYSRERYICNSGFKRKAGTSSLTECVLNKATNVAHWTTPSLKCIRDPALVHQRPAPPSGGSGGGGSGGGSGGGGSGGGNWVNVISDLKKIEDLIQSMHIDATLYTESDVHPSCKVTAMKCFLLELQVISLESGDASIHDTVENLIILANNSLSSNGNVTESGCKECEELEEKNIKEFLQSFVHIVAMFINTSGGGGSGGGGSDKTHTCPPCPAPELLGGPSVFLFPPKPKDTLMISRTPEVTCVVVDVSHEDPEVKFNWYVDGVEVHNAKTKPREEQYASTYRVVSVLTVLHQDWLNGKEYKCKVSNKALPAPIEKTISKAKGQPREPQVYTLPPCREEMTKNQVSLWCLVKGFYPSDIAVEWESNGQPENNYKTTPPVLDSDGSFFLYSKLTVDKSRWQQGNVFSCSVMHEALHNHYTQKSLSLSP

SEQ ID NO: 313 - protein, 447 aa, synthetic construct
ITCPPPMSVEHADIWVKSYSLYSRERYICNSGFKRKAGTSSLTECVLNKATNVAHWTTPSLKCIRDPALVHQRPAPPSGGSGGGGSGGGSGGGGSGGGNWVNVISDLKKIEDLIQSMHIDATLYTESDVHPSCKVTAMKCFLLELQVISLESGDASIHDTVEQLIILANNSLSSNGNVTESGCKECEELEEKNIKEFLQSFVHIVQMFINTSGGGGSGGGGSDKTHTCPPCPAPELLGGPSVFLFPPKPKDTLMISRTPEVTCVVVDVSHEDPEVKFNWYVDGVEVHNAKTKPREEQYASTYRVVSVLTVLHQDWLNGKEYKCKVSNKALPAPIEKTISKAKGQPREPQVYTLPPCREEMTKNQVSLWCLVKGFYPSDIAVEWESNGQPENNYKTTPPVLDSDGSFFLYSKLTVDKSRWQQGNVFSCSVMHEALHNHYTQKSLSLSP

SEQ ID NO: 314 - protein, 446 aa, synthetic construct
ITCPPPMSVEHADIWVKSYSLYSRERYICNSGFKRKAGTSSLTECVLNKATNVAHWTTPSLKCIRDPALVHQRPAPPSGGSGGGGSGGGSGGGGSGGNWVNVISDLKKIEDLIQSMHIDATLYTESDVHPSCKVTAMKCFLLELQVISLESGDASIHDTVENLIILANNSLSSNGNVTESGCKECEELEEKNIKEFLQSFVHIVQMFINTSGGGGSGGGGSDKTHTCPPCPAPELLGGPSVFLFPPKPKDTLMISRTPEVTCVVVDVSHEDPEVKFNWYVDGVEVHNAKTKPREEQYASTYRVVSVLTVLHQDWLNGKEYKCKVSNKALPAPIEKTISKAKGQPREPQVYTLPPCREEMTKNQVSLWCLVKGFYPSDIAVEWESNGQPENNYKTTPPVLDSDGSFFLYSKLTVDKSRWQQGNVFSCSVMHEALHNHYTQKSLSLSP

SEQ ID NO: 315 - protein, 349 aa, synthetic construct
NWVNVISDLKKIEDLIQSMHIDATLYTESDVHPSCKVTAMKCFLLELQVISLESGDASIHDTVENLIILANNSLSSNGNVTESGCKECEELEEKNIKEFLQSFVHIVQMFINTSGGGGSGGGGSDKTHTCPPCPAPELLGGPSVFLFPPKPKDTLMISRTPEVTCVVVDVSHEDPEVKFNWYVDGVEVHNAKTKPREEQYASTYRVVSVLTVLHQDWLNGKEYKCKVSNKALPAPIEKTISKAKGQPREPQVYTLPPCREEMTKNQVSLWCLVKGFYPSDIAVEWESNGQPENNYKTTPPVLDSDGSFFLYSKLTVDKSRWQQGNVFSCSVMHEALHNHYTQKSLSLSP

SEQ ID NO: 316 - protein, 387 aa, synthetic construct
DCDIEGKDGKQYESVLMVSIDQLLDSMKEIGSNCLNNEFNFFKRHICDANKEGMFLFRAARKLRQFLKMNSTGDFDLHLLKVSEGTTILLNCTGQVKGRKPAALGEAQPTKSLEENKSLKEQKKLNDLCFLKRLLQEIKTCWNKILMGTKEHGGGGSGGGGSDKTHTCPPCPAPELLGGPSVFLFPPKPKDTLMISRTPEVTCVVVDVSHEDPEVKFNWYVDGVEVHNAKTKPREEQYASTYRVVSVLTVLHQDWLNGKEYKCKVSNKALPAPIEKTISKAKGQPREPQVYTLPPCREEMTKNQVSLWCLVKGFYPSDIAVEWESNGQPENNYKTTPPVLDSDGSFFLYSKLTVDKSRWQQGNVFSCSVMHEALHNHYTQKSLSLSP

SEQ ID NO: 317 - protein, 753 aa, synthetic construct
IWELKKDVYVVELDWYPDAPGEMVVLTCDTPEEDGITWTLDQSSEVLGSGKTLTIQVKEFGDAGQYTCHKGGEVLSHSLLLLHKKEDGIWSTDILKDQKEPKNKTFLRCEAKNYSGRFTCWWLTTISTDLTFSVKSSRGSSDPQGVTCGAATLSAERVRGDNKEYEYSVECQEDSACPAAEESLPIEVMVDAVHKLKYENYTSSFFIRDIIKPDPPKNLQLKPLKNSRQVEVSWEYPDTWSTPHSYFSLTFCVQVQGKSKREKKDRVFTDKTSATVICRKNASISVRAQDRYYSSSWSEWASVPCSGGGGSGGGGSGGGGSRNLPVATPDPGMFPCLHHSQNLLRAVSNMLQKARQTLEFYPCTSEEIDHEDITKDKTSTVEACLPLELTKNESCLNSRETSFITNGSCLASRKTSFMMALCLSSIYEDLKMYQVEFKTMNAKLLMDPKRQIFLDQNMLAVIDELMQALNFNSETVPQKSSLEEPDFYKTKIKLCILLHAFRIRAVTIDRVMSYLNASGGGGSGGGGSDKTHTCPPCPAPELLGGPSVFLFPPKPKDTLMISRTPEVTCVVVDVSHEDPEVKFNWYVDGVEVHNAKTKPREEQYASTYRVVSVLTVLHQDWLNGKEYKCKVSNKALPAPIEKTISKAKGQPREPQVYTLPPCREEMTKNQVSLWCLVKGFYPSDIAVEWESNGQPENNYKTTPPVLDSDGSFFLYSKLTVDKSRWQQGNVFSCSVMHEALHNHYTQKSLSLSP

SEQ ID NO: 318 - protein, 10 aa, synthetic construct
FPAVLQSDLY

SEQ ID NO: 319 - protein, 112 aa, synthetic construct
DVVMTQTPLSLPVTLGQPASISCRSSQSLVYRDGNAYLSWFQQRPGQSPRRLIYKVSNWQSGVPDRFSGGGSGTDFTLKISRVEAEDVGVYYCMQGTHWPPTFGQGTKVEIK

SEQ ID NO: 320 - protein, 1093 aa, synthetic construct
QVQLQEWGPGLVKPSETLSLTCTVSGASISSFYWSWIRQPPGKGLEWIGYIYYSGTTNYNPSLKSRVTISVDTSKNQLSLKLSSVTAADTAVYYCARIAVAGFFFDYWGQGTLVTVSSGGGGSGGGGSGGGGSEIVLTQSPGTLSLSPGERATLSCRASQSVNKNYLAWYQQKPGQAPRLLIYGASSRATGIPDRFSGSGSGTDFTLTISRLEPEDFAVYYCQQYDRSPLTFGGGTKVDIKSGGGGSEVQLVESGGGLVQPGGSLRLSCAASGFTFNSYAMNWVRQAPGKGLEWVARIRSKYNNYATYYADSVKGRFTISRDDSKNTAYLQMNSLKTEDTAVYYCVRHGNFGNSYVSWWAYWGQGTLVTVSSGGGGSGGGGSGGGGSQTVVTQEPSLTVSPGGTVTLTCGSSTGAVTSGNYPNWVQQKPGQAPRGLIGGTKFLAPGTPARFSGSLLGGKAALTLSGVQPEDEAEYYCVLWYSNRWVFGGGTKLTVLPGGGGSDAHKSEVAHRFKDLGEENFKALVLIAFAQYLQQCPFEDHVKLVNEVTEFAKTCVADESAENCDKSLHTLFGDKLCTVATLRETYGEMADCCAKQEPERNECFLQHKDDNPNLPRLVRPEVDVMCTAFHDNEETFLKKYLYEIARRHPYFYAPELLFFAKRYKAAFTECCQAADKAACLLPKLDELRDEGKASSAKQRLKCASLQKFGERAFKAWAVARLSQRFPKAEFAEVSKLVTDLTKVHTECCHGDLLECADDRADLAKYICENQDSISSKLKECCEKPLLEKSHCIAEVENDEMPADLPSLAADFVESKDVCKNYAEAKDVFLGMFLYEYARRHPDYSVVLLLRLAKTYETTLEKCCAAADPHECYAKVFDEFKPLVEEPQNLIKQNCELFEQLGEYKFQNALLVRYTKKVPQVSTPTLVEVSRNLGKVGSKCCKHPEAKRMPCAEDYLSVVLNQLCVLHEKTPVSDRVTKCCTESLVNRRPCFSALEVDETYVPKEFNAETFTFHADICTLSEKERQIKKQTALVELVKHKPKATKEQLKAVMDDFAAFVEKCCKADDKETCFAEEGKKLVAASQAALGLHHHHHH

SEQ ID NO: 321 - protein, 250 aa, synthetic construct
QVQLVQSGAEVKKPGASVKVSCKASGYTFTNYYMHWVRQAPGQGLEWMGIINPSEGSTSYAQKFQGRVTMTRDTSTNTVYMDLSSLRSEDTAVYYCARGGNSAFYSYYDMDVWGQGTTVTVSSGGGGSGGGGSGGGGSDVVMTQTPLSLPVTLGQPASISCRSSQSLVYREGNTYLSWFQQRPGQSPRRLIYKVSNWQSGVPDRFSGSGSGTDFTLKISRVEAEDVGVYYCMQGTHWPPTFGQGTKVEIK

SEQ ID NO: 322-501 - skipped (180 entries)

SEQ ID NO: 502 - protein, 213 aa, synthetic construct
EIVLTQSPATLSLSPGERATLSCSASSSVSYMHWYQQKPGLAPRRLIYDTSKLASGIPDRFSGSGSGNDYTLTISRLEPEDFAVYYCQQWSKHPLTFGQGTKVEIKRTVAAPSVFIFPPSDEQLKSGTASVVCLLNNFYPREAKVQWKVDNALQSGNSQESVTEQDSKDSTYSLSSTLTLSKADYEKHKVYACEVTHQGLSSPVTKSFNRGEC

SEQ ID NO: 503-504 - skipped (2 entries)

SEQ ID NO: 505 - protein, 449 aa, synthetic construct
QVQLVQSGAEVKKPGSSVKVSCKASGYSFTGYTMNWVRQAPGQGLEWMGLITPYNGASSYNQKFRGRVTITVDKSTSTAYMELSSLRSEDTAVYYCARGGYDGRGFDYWGQGTLVTVSSASTKGPSVFPLAPSSKSTSGGTAALGCLVKDYFPEPVTVSWNSGALTSGVHTFPAVLQSSGLYSLSSVVTVPSSSLGTQTYICNVNHKPSNTKVDKRVEPKSCDKTHTCPPCPAPELLGGPSVFLFPPKPKDTLMISRTPEVTCVVVDVSHEDPEVKFNWYVDGVEVHNAKTKPREEQYASTYRVVSVLTVLHQDWLNGKEYKCKVSNKALPAPIEKTISKAKGQPREPQVYTLPPSRDELTKNQVSLTCLVKGFYPSDIAVEWESNGQPENNYKTTPPVLDSDGSFFLYSRLTVDKSRWQQGNVFSCSVMHEALHNHYTQKSLSLSPGK

SEQ ID NO: 506 - protein, 455 aa, synthetic construct
EVKLVESGGGLVQPGGSLRLSCAASGFTFNTYAMNWVRQAPGKGLEWVARIRSKYNNYATYYADSVKDRFTISRDDSKSSLYLQMNNLKTEDTAMYYCVRHGNFGNSYVSWFAYWGQGTLVTVSSASTKGPSVFPLAPSSKSTSGGTAALGCLVKDYFPEPVTVSWNSGALTSGVHTFPAVLQSSGLYSLSSVVTVPSSSLGTQTYICNVNHKPSNTKVDKRVEPKSCDKTHTCPPCPAPELLGGPSVFLFPPKPKDTLMISRTPEVTCVVVDVSHEDPEVKFNWYVDGVEVHNAKTKPREEQYASTYRVVSVLTVLHQDWLNGKEYKCKVSNKALPAPIEKTISKAKGQPREPQVYTLPPSRDELTKNQVSLTCLVKGFYPSDIAVEWESNGQPENNYKTTPPVLDSDGSFLLYSKLTVDKSRWQQGNVFSCSVMHEALHNHYTQKSLSLSPGK

SEQ ID NO: 507 - protein, 215 aa, synthetic construct
QAVVTQEPSFSVSPGGTVTLTCRSSTGAVTTSNYANWVQQTPGQAFRGLIGGTNKRAPGVPARFSGSLIGDKAALTITGAQADDESIYFCALWYSNLWVFGGGTKLTVLGQPKANPTVTLFPPSSEELQANKATLVCLISDFYPGAVTVAWKADGSPVKAGVETTKPSKQSNNKYAASSYLSLTPEQWKSHRSYSCQVTHEGSTVEKTVAPTECS

SEQ ID NO: 508-509 - skipped (2 entries)

SEQ ID NO: 510 - protein, 215 aa, synthetic construct
DIVLTQPPSVSGAPGQRVTISCSGSSSNIGSNYVSWYQQLPGTAPKLLIYNDNQRPSGVPDRFSGSKSGTSASLAITGLQSEDEADYYCSTYDRRTFSVFGGGTKLTVLGQPKANPTVTLFPPSSEELQANKATLVCLISDFYPGAVTVAWKADGSPVKAGVETTKPSKQSNNKYAASSYLSLTPEQWKSHRSYSCQVTHEGSTVEKTVAPTECS

SEQ ID NO: 511-514 - skipped (4 entries)

SEQ ID NO: 515 - protein, 445 aa, synthetic construct
EVQLVESGGGLVQPGKSLKLSCEASGFTFSGYGMHWVRQAPGRGLESVAYITSSSINIKYADAVKGRFTVSRDNAKNLLFLQMNILKSEDTAMYYCARFDWDKNYWGQGTMVTVSSAKTTAPSVYPLAPVSGDTTGSSVTLGCLVKGYFPEPVTLTWNSGSLSSGVHTFPAVLQSDLYTLSSSVTVTSSTWPSQSITCNVAHPASSTKVDKKIEPKSCDKTHTCPPCPAPNAAGGPSVFIFPPKIKDVLMISLSPIVTCVVVDVSEDDPDVQISWFVNNVEVHTAQTQTHREDYNSTLRVVSALPIQHQDWMSGKEFKCKVNNKDLGAPIERTISKPKGSVRAPQVYVLPPPEEEMTKKQVTLTCMVTDFMPEDIYVEWTNNGKTELNYKNTEPVLDSDGSYLMYSKLTVEKKNWVERNSYSCSVVHEGLHNHHTTKSFSRTPGK

SEQ ID NO: 516 - protein, 214 aa, synthetic construct
DIQMTQSPSSLPASLGDRVTINCQASQDISNYLNWYQQKPGKAPKLLIYYTNKLADGVPSRFSGSGSGRDSSFTISSLESEDIGSYYCQQYYNYPWTFGPGTKLEIKRADAAPTVSIFPPSSEQLTSGGASVVCFLNNFYPKDINVKWKIDGSERQNGVLNSWTDQDSKDSTYSMSSTLTLTKDEYERHNSYTCEATHKTSTSPIVKSFNRNEC

SEQ ID NO: 517 - skipped

SEQ ID NO: 518 - protein, 682 aa, synthetic construct
QVQLVQSGAEVKKPGASVKVSCKASGYTFTGNYINWVRQAPGQGLEWMGIINPTKGWTLYAQKFQGRVTMTRDTSISTAYMELSSLRSEDTAVYYCARWHHGTWIFDYWGQGTLVTVSSASTKGPSVFPLAPSSKSTSGGTAALGCLVKDYFPEPVTVSWNSGALTSGVHTFPAVLQSSGLYSLSSVVTVPSSSLGTQTYICNVNHKPSNTKVDKRVEPKSCDGGGGSGGGGSQVQLVQSGAEVKKPGASVKVSCKASGYTFTGNYINWVRQAPGQGLEWMGIINPTKGWTLYAQKFQGRVTMTRDTSISTAYMELSSLRSEDTAVYYCARWHHGTWIFDYWGQGTLVTVSSASTKGPSVFPLAPSSKSTSGGTAALGCLVKDYFPEPVTVSWNSGALTSGVHTFPAVLQSSGLYSLSSVVTVPSSSLGTQTYICNVNHKPSNTKVDKRVEPKSCDKTHTCPPCPAPNAAGGPSVFIFPPKIKDVLMISLSPIVTCVVVDVSEDDPDVQISWFVNNVEVHTAQTQTHREDYNSTLRVVSALPIQHQDWMSGKEFKCKVNNKDLGAPIERTISKPKGSVRAPQVYVLPPPEEEMTKKQVTLTCMVKDFMPEDIYVEWTNNGKTELNYKNTEPVLDSDGSYFMYSRLRVEKKNWVERNSYSCSVVHEGLHNHHTTKSFSRTPGK

SEQ ID NO: 519 - skipped

SEQ ID NO: 520 - protein, 214 aa, synthetic construct
AIQMSQSPASLSASVGETVTITCRASGNIYNYLAWYQQKQGKSPHLLVYDAKTLADGVPSRFSGSGSGTQYSLKISSLQTEDSGNYYCQHFWSLPFTFGSGTKLEIKRADAAPTVSIFPPSSEQLTSGGASVVCFLNNFYPKDINVKWKIDGSERQNGVLNSWTDQDSKDSTYSMSSTLTLTKDEYERHNSYTCEATHKTSTSPIVKSFNRNEC

SEQ ID NO: 521 - skipped

SEQ ID NO: 522 - protein, 450 aa, synthetic construct
EVQLQQSGAELVRPGALVKLSCKTSGFNIKDYFLHWVRQRPDQGLEWIGWINPDNGNTVYDPKFQGTASLTADTSSNTVYLQLSGLTSEDTAVYFCTRRDYTYEKAALDYWGQGASVIVSSAKTTAPSVYPLAPVSGDTTGSSVTLGCLVKGYFPEPVTLTWNSGSLSSGVHTFPAVLQSDLYTLSSSVTVTSSTWPSQSITCNVAHPASSTKVDKKIEPKSCDKTHTCPPCPAPNAAGGPSVFIFPPKIKDVLMISLSPIVTCVVVDVSEDDPDVQISWFVNNVEVHTAQTQTHREDYNSTLRVVSALPIQHQDWMSGKEFKCKVNNKDLGAPIERTISKPKGSVRAPQVYVLPPPEEEMTKKQVTLTCMVKDFMPEDIYVEWTNNGKTELNYKNTEPVLDSDGSYFMYSRLRVEKKNWVERNSYSCSVVHEGLHNHHTTKSFSRTPGK

SEQ ID NO: 523 - protein, 119 aa, synthetic construct
QVQLVQSGAEVKKPGSSVKVSCKASGYSFTGYTMNWVRQAPGQGLEWMGLITPYNGASSYNQKFRGRVTITVDKSTSTAYMELSSLRSEDTAVYYCARGGYDGRGFDYWGQGTLVTVSS

SEQ ID NO: 524 - protein, 10 aa, synthetic construct
GYSFTGYTMN

SEQ ID NO: 525 - protein, 17 aa, synthetic construct
LITPYNGASSYNQKFRG

SEQ ID NO: 526 - protein, 10 aa, synthetic construct
GGYDGRGFDY

SEQ ID NO: 527 - protein, 106 aa, synthetic construct
EIVLTQSPATLSLSPGERATLSCSASSSVSYMHWYQQKPGLAPRRLIYDTSKLASGIPDRFSGSGSGNDYTLTISRLEPEDFAVYYCQQWSKHPLTFGQGTKVEIK

SEQ ID NO: 528 - protein, 9 aa, synthetic construct
QQWSKHPLT

SEQ ID NO: 529 - protein, 125 aa, synthetic construct
EVKLVESGGGLVQPGGSLRLSCAASGFTFNTYAMNWVRQAPGKGLEWVARIRSKYNNYATYYADSVKDRFTISRDDSKSSLYLQMNNLKTEDTAMYYCVRHGNFGNSYVSWFAYWGQGTLVTVSS

SEQ ID NO: 530 - protein, 10 aa, synthetic construct
GFTFNTYAMN

SEQ ID NO: 531 - protein, 19 aa, synthetic construct
RIRSKYNNYATYYADSVKD

SEQ ID NO: 532 - protein, 14 aa, synthetic construct
HGNFGNSYVSWFAY

SEQ ID NO: 533 - protein, 109 aa, synthetic construct
QAVVTQEPSFSVSPGGTVTLTCRSSTGAVTTSNYANWVQQTPGQAFRGLIGGTNKRAPGVPARFSGSLIGDKAALTITGAQADDESIYFCALWYSNLWVFGGGTKLTVL

SEQ ID NO: 534 - protein, 14 aa, synthetic construct
RSSTGAVTTSNYAN

SEQ ID NO: 535 - protein, 7 aa, synthetic construct
GTNKRAP

SEQ ID NO: 536 - protein, 9 aa, synthetic construct
ALWYSNLWV

SEQ ID NO: 537 - protein, 119 aa, synthetic construct
QVQLVQSGAEVKKPGASVKVSCKASGYTFTGNYINWVRQAPGQGLEWMGIINPTKGWTLYAQKFQGRVTMTRDTSISTAYMELSSLRSEDTAVYYCARWHHGTWIFDYWGQGTLVTVSS

SEQ ID NO: 538 - protein, 10 aa, synthetic construct
GYTFTGNYIN

SEQ ID NO: 539 - protein, 17 aa, synthetic construct
IINPTKGWTLYAQKFQG

SEQ ID NO: 540 - protein, 10 aa, synthetic construct
WHHGTWIFDY

SEQ ID NO: 541-547 - skipped (7 entries)

SEQ ID NO: 548 - protein, 104 aa, synthetic construct
ASTKGPSVFPLAPSSKSTSGGTAALGCLVKDYFPEPVTVSWNSGALTSGVHTFPAVLQSSGLYSLSSVVTVPSSSLGTQTYICNVNHKPSNTKVDKRVEPKSCD

SEQ ID NO: 549 - protein, 103 aa, synthetic construct
ASTKGPSVFPLAPSSKSTSGGTAALGCLVKDYFPEPVTVSWNSGALTSGVHTFPAVLQSSGLYSLSSVVTVPSSSLGTQTYICNVNHKPSNTKVDKRVEPKSC

SEQ ID NO: 550-553 - skipped (4 entries)

SEQ ID NO: 554 - protein, 330 aa, synthetic construct
ASTKGPSVFPLAPSSKSTSGGTAALGCLVKDYFPEPVTVSWNSGALTSGVHTFPAVLQSSGLYSLSSVVTVPSSSLGTQTYICNVNHKPSNTKVDKRVEPKSCDKTHTCPPCPAPELLGGPSVFLFPPKPKDTLMISRTPEVTCVVVDVSHEDPEVKFNWYVDGVEVHNAKTKPREEQYASTYRVVSVLTVLHQDWLNGKEYKCKVSNKALPAPIEKTISKAKGQPREPQVYTLPPSRDELTKNQVSLTCLVKGFYPSDIAVEWESNGQPENNYKTTPPVLDSDGSFFLYSRLTVDKSRWQQGNVFSCSVMHEALHNHYTQKSLSLSPGK

SEQ ID NO: 555 - protein, 227 aa, synthetic construct
DKTHTCPPCPAPELLGGPSVFLFPPKPKDTLMISRTPEVTCVVVDVSHEDPEVKFNWYVDGVEVHNAKTKPREEQYASTYRVVSVLTVLHQDWLNGKEYKCKVSNKALPAPIEKTISKAKGQPREPQVYTLPPSRDELTKNQVSLTCLVKGFYPSDIAVEWESNGQPENNYKTTPPVLDSDGSFFLYSRLTVDKSRWQQGNVFSCSVMHEALHNHYTQKSLSLSPGK

SEQ ID NO: 556 - protein, 330 aa, synthetic construct
ASTKGPSVFPLAPSSKSTSGGTAALGCLVKDYFPEPVTVSWNSGALTSGVHTFPAVLQSSGLYSLSSVVTVPSSSLGTQTYICNVNHKPSNTKVDKRVEPKSCDKTHTCPPCPAPELLGGPSVFLFPPKPKDTLMISRTPEVTCVVVDVSHEDPEVKFNWYVDGVEVHNAKTKPREEQYASTYRVVSVLTVLHQDWLNGKEYKCKVSNKALPAPIEKTISKAKGQPREPQVYTLPPSRDELTKNQVSLTCLVKGFYPSDIAVEWESNGQPENNYKTTPPVLDSDGSFLLYSKLTVDKSRWQQGNVFSCSVMHEALHNHYTQKSLSLSPGK

SEQ ID NO: 557 - protein, 227 aa, synthetic construct
DKTHTCPPCPAPELLGGPSVFLFPPKPKDTLMISRTPEVTCVVVDVSHEDPEVKFNWYVDGVEVHNAKTKPREEQYASTYRVVSVLTVLHQDWLNGKEYKCKVSNKALPAPIEKTISKAKGQPREPQVYTLPPSRDELTKNQVSLTCLVKGFYPSDIAVEWESNGQPENNYKTTPPVLDSDGSFLLYSKLTVDKSRWQQGNVFSCSVMHEALHNHYTQKSLSLSPGK

SEQ ID NO: 558 - protein, 106 aa, synthetic construct
GQPKANPTVTLFPPSSEELQANKATLVCLISDFYPGAVTVAWKADGSPVKAGVETTKPSKQSNNKYAASSYLSLTPEQWKSHRSYSCQVTHEGSTVEKTVAPTECS

SEQ ID NO: 559-560 - skipped (2 entries)

SEQ ID NO: 561 - protein, 109 aa, synthetic construct
DIVLTQPPSVSGAPGQRVTISCSGSSSNIGSNYVSWYQQLPGTAPKLLIYNDNQRPSGVPDRFSGSKSGTSASLAITGLQSEDEADYYCSTYDRRTFSVFGGGTKLTVL

SEQ ID NO: 562 - protein, 13 aa, synthetic construct
SGSSSNIGSNYVS

SEQ ID NO: 563 - protein, 7 aa, synthetic construct
NDNQRPS

SEQ ID NO: 564 - protein, 10 aa, synthetic construct
STYDRRTFSV

SEQ ID NO: 565-566 - skipped (2 entries)

SEQ ID NO: 567 - protein, 116 aa, synthetic construct
EVQLVESGGGLVQPGKSLKLSCEASGFTFSGYGMHWVRQAPGRGLESVAYITSSSINIKYADAVKGRFTVSRDNAKNLLFLQMNILKSEDTAMYYCARFDWDKNYWGQGTMVTVSS

SEQ ID NO: 568 - protein, 10 aa, synthetic construct
GFTFSGYGMH

SEQ ID NO: 569 - protein, 17 aa, synthetic construct
YITSSSINIKYADAVKG

SEQ ID NO: 570 - protein, 7 aa, synthetic construct
FDWDKNY

SEQ ID NO: 571 - protein, 329 aa, synthetic construct
AKTTAPSVYPLAPVSGDTTGSSVTLGCLVKGYFPEPVTLTWNSGSLSSGVHTFPAVLQSDLYTLSSSVTVTSSTWPSQSITCNVAHPASSTKVDKKIEPKSCDKTHTCPPCPAPNAAGGPSVFIFPPKIKDVLMISLSPIVTCVVVDVSEDDPDVQISWFVNNVEVHTAQTQTHREDYNSTLRVVSALPIQHQDWMSGKEFKCKVNNKDLGAPIERTISKPKGSVRAPQVYVLPPPEEEMTKKQVTLTCMVTDFMPEDIYVEWTNNGKTELNYKNTEPVLDSDGSYLMYSKLTVEKKNWVERNSYSCSVVHEGLHNHHTTKSFSRTPGK

SEQ ID NO: 572 - protein, 102 aa, synthetic construct
AKTTAPSVYPLAPVSGDTTGSSVTLGCLVKGYFPEPVTLTWNSGSLSSGVHTFPAVLQSDLYTLSSSVTVTSSTWPSQSITCNVAHPASSTKVDKKIEPKSC

SEQ ID NO: 573 - protein, 227 aa, synthetic construct
DKTHTCPPCPAPNAAGGPSVFIFPPKIKDVLMISLSPIVTCVVVDVSEDDPDVQISWFVNNVEVHTAQTQTHREDYNSTLRVVSALPIQHQDWMSGKEFKCKVNNKDLGAPIERTISKPKGSVRAPQVYVLPPPEEEMTKKQVTLTCMVTDFMPEDIYVEWTNNGKTELNYKNTEPVLDSDGSYLMYSKLTVEKKNWVERNSYSCSVVHEGLHNHHTTKSFSRTPGK

SEQ ID NO: 574 - protein, 107 aa, synthetic construct
DIQMTQSPSSLPASLGDRVTINCQASQDISNYLNWYQQKPGKAPKLLIYYTNKLADGVPSRFSGSGSGRDSSFTISSLESEDIGSYYCQQYYNYPWTFGPGTKLEIK

SEQ ID NO: 575 - protein, 11 aa, synthetic construct
QASQDISNYLN

SEQ ID NO: 576 - protein, 7 aa, synthetic construct
YTNKLAD

SEQ ID NO: 577 - protein, 9 aa, synthetic construct
QQYYNYPWT

SEQ ID NO: 578 - protein, 330 aa, synthetic construct
ASTKGPSVFPLAPSSKSTSGGTAALGCLVKDYFPEPVTVSWNSGALTSGVHTFPAVLQSSGLYSLSSVVTVPSSSLGTQTYICNVNHKPSNTKVDKRVEPKSCDKTHTCPPCPAPNAAGGPSVFIFPPKIKDVLMISLSPIVTCVVVDVSEDDPDVQISWFVNNVEVHTAQTQTHREDYNSTLRVVSALPIQHQDWMSGKEFKCKVNNKDLGAPIERTISKPKGSVRAPQVYVLPPPEEEMTKKQVTLTCMVKDFMPEDIYVEWTNNGKTELNYKNTEPVLDSDGSYFMYSRLRVEKKNWVERNSYSCSVVHEGLHNHHTTKSFSRTPGK

SEQ ID NO: 579 - protein, 227 aa, synthetic construct
DKTHTCPPCPAPNAAGGPSVFIFPPKIKDVLMISLSPIVTCVVVDVSEDDPDVQISWFVNNVEVHTAQTQTHREDYNSTLRVVSALPIQHQDWMSGKEFKCKVNNKDLGAPIERTISKPKGSVRAPQVYVLPPPEEEMTKKQVTLTCMVKDFMPEDIYVEWTNNGKTELNYKNTEPVLDSDGSYFMYSRLRVEKKNWVERNSYSCSVVHEGLHNHHTTKSFSRTPGK

SEQ ID NO: 580 - protein, 121 aa, synthetic construct
EVQLQQSGAELVRPGALVKLSCKTSGFNIKDYFLHWVRQRPDQGLEWIGWINPDNGNTVYDPKFQGTASLTADTSSNTVYLQLSGLTSEDTAVYFCTRRDYTYEKAALDYWGQGASVIVSS

SEQ ID NO: 581 - protein, 10 aa, synthetic construct
GFNIKDYFLH

SEQ ID NO: 582 - protein, 17 aa, synthetic construct
WINPDNGNTVYDPKFQG

SEQ ID NO: 583 - protein, 12 aa, synthetic construct
RDYTYEKAALDY

SEQ ID NO: 584 - skipped

SEQ ID NO: 585 - protein, 107 aa, synthetic construct
AIQMSQSPASLSASVGETVTITCRASGNIYNYLAWYQQKQGKSPHLLVYDAKTLADGVPSRFSGSGSGTQYSLKISSLQTEDSGNYYCQHFWSLPFTFGSGTKLEIK

SEQ ID NO: 586 - protein, 11 aa, synthetic construct
RASGNIYNYLA

SEQ ID NO: 587 - protein, 7 aa, synthetic construct
DAKTLAD

SEQ ID NO: 588 - protein, 9 aa, synthetic construct
QHFWSLPFT

SEQ ID NO: 589-600 - skipped (12 entries)

SEQ ID NO: 601 - protein, 329 aa, synthetic construct
AKTTAPSVYPLAPVSGDTTGSSVTLGCLVKGYFPEPVTLTWNSGSLSSGVHTFPAVLQSDLYTLSSSVTVTSSTWPSQSITCNVAHPASSTKVDKKIEPKSCDKTHTCPPCPAPNAAGGPSVFIFPPKIKDVLMISLSPIVTCVVVDVSEDDPDVQISWFVNNVEVHTAQTQTHREDYNSTLRVVSALPIQHQDWMSGKEFKCKVNNKDLGAPIERTISKPKGSVRAPQVYVLPPPEEEMTKKQVTLTCMVKDFMPEDIYVEWTNNGKTELNYKNTEPVLDSDGSYFMYSRLRVEKKNWVERNSYSCSVVHEGLHNHHTTKSFSRTPGK

SEQ ID NO: 602-1003 - skipped (402 entries)

SEQ ID NO: 1004 - protein, 721 aa, synthetic construct
METDTLLLWVLLLWVPGSTGQVQLVQSGAEVKKPGSSVKVSCKASGYSFTTYYIHWVRQAPGQGLEWMGWFFPGSGNIKYNEKFKGRVTITADTSTSTAYMELSSLRSEDTAVYYCAGSYYSYDVLDYWGQGTTVTVSSGGGGSGGGGSGGGGSGGGGSDIQMTQSPSFLSASVGDRVTITCKASQNVGINVVWHQQKPGKAPKALIYSSSHRYSGVPSRFSGSGSGTEFTLTISSLQPEDFATYFCQQFKSYPLTFGQGTKLEIKGGGGSQVTLRESGPALVKPTQTLTLTCTFSGFSLSTSGMGVGWIRQPPGKALEWLAHIWWDDDKRYNPALKSRLTISKDTSKNQVFLTMTNMDPVDTATYYCARMELWSYYFDYWGQGTTVTVSSASTKGPSVFPLAPSSKSTSGGTAALGCLVKDYFPEPVTVSWNSGALTSGVHTFPAVLQSSGLYSLSSVVTVPSSSLGTQTYICNVNHKPSNTKVDKKVEPKSCDKTHTCPPCPAPELLGGPSVFLFPPKPKDTLMISRTPEVTCVVVDVSHEDPEVKFNWYVDGVEVHNAKTKPREEQYASTYRVVSVLTVLHQDWLNGKEYKCKVSNKALPAPIEKTISKAKGQPREPQVYTLPPSREEMTKNQVSLTCLVKGFYPSDIAVEWESNGQPENNYKTTPPVLDSDGSFFLYSKLTVDKSRWQQGNVFSCSVMHEALHNHYTQKSLSLSPGK

SEQ ID NO: 1005 - protein, 233 aa, synthetic construct
METPAQLLFLLLLWLPDTTGENVLTQSPATLSLSPGERATLSCSASSSVSYMHWYQQKPGQAPRLLIYDTSKLASGIPARFSGSGSGTDHTLTISSLEPEDFAVYYCFQGSVYPFTFGQGTKLEIKRTVAAPSVFIFPPSDEQLKSGTASVVCLLNNFYPREAKVQWKVDNALQSGNSQESVTEQDSKDSTYSLSSTLTLSKADYEKHKVYACEVTHQGLSSPVTKSFNRGEC

SEQ ID NO: 1006 - protein, 721 aa, synthetic construct
METDTLLLWVLLLWVPGSTGQVQLVQSGAEVKKPGSSVKVSCKASGYSFTTYYIHWVRQAPGQGLEWMGWFFPGSGNIKYNEKFKGRVTITADTSTSTAYMELSSLRSEDTAVYYCAGSYYSYDVLDYWGQGTTVTVSSGGGGSGGGGSGGGGSGGGGSDIQMTQSPSFLSASVGDRVTITCKASQNVGINVVWHQQKPGKAPKALIYSSSHRYSGVPSRFSGSGSGTEFTLTISSLQPEDFATYFCQQFKSYPLTFGQGTKLEIKGGGGSQVQLVESGGGVVQPGRSLRLSCAASGIDFSRYWMSWVRQAPGKGLEWVGEINPDSSTINYAPSLKDRFTISRDNSKNTLYLQMSSLRAEDTAVYYCASLYYDYGDAMDYWGQGTTVTVSSASTKGPSVFPLAPSSKSTSGGTAALGCLVKDYFPEPVTVSWNSGALTSGVHTFPAVLQSSGLYSLSSVVTVPSSSLGTQTYICNVNHKPSNTKVDKKVEPKSCDKTHTCPPCPAPELLGGPSVFLFPPKPKDTLMISRTPEVTCVVVDVSHEDPEVKFNWYVDGVEVHNAKTKPREEQYASTYRVVSVLTVLHQDWLNGKEYKCKVSNKALPAPIEKTISKAKGQPREPQVYTLPPSREEMTKNQVSLTCLVKGFYPSDIAVEWESNGQPENNYKTTPPVLDSDGSFFLYSKLTVDKSRWQQGNVFSCSVMHEALHNRFTQKSLSLSPGK

SEQ ID NO: 1007 - protein, 234 aa, synthetic construct
METDTLLLWVLLLWVPGSTGDIQMTQSPSSLSASVGDRVTITCKASQSVDSNVAWYQQKPEKAPKALIFSASLRFSGVPSRFSGSGSGTDFTLTISSLQPEDFATYFCQQYNNYPLTFGQGTKLEIKRTVAAPSVFIFPPSDEQLKSGTASVVCLLNNFYPREAKVQWKVDNALQSGNSQESVTEQDSKDSTYSLSSTLTLSKADYEKHKVYACEVTHQGLSSPVTKSFNRGEC

SEQ ID NO: 1008-1099 - skipped (92 entries)

SEQ ID NO: 1100 - protein, 119 aa, synthetic construct; identical to SEQ ID NO: 9

SEQ ID NO: 1101 - protein, 106 aa, synthetic construct
QSVLTQPPSVSEAPRQRVTISCKASQNVGINVVWHQQLPGKAPKALIYSSSHRYSGVSDRFSGSGSGTSFSLAISGLQSEDEADYFCQQFKSYPLTFGTGTKVTVL

SEQ ID NO: 1102 - protein, 5 aa, synthetic construct
SAYMH

SEQ ID NO: 1103 - protein, 17 aa, synthetic construct
RIDPATGKTKYAPKFQA

SEQ ID NO: 1104 - protein, 10 aa, synthetic construct
SLNWDYGLDY

SEQ ID NO: 1105 - protein, 7 aa, synthetic construct
GFNIKSA

SEQ ID NO: 1106 - protein, 6 aa, synthetic construct
DPATGK

SEQ ID NO: 1107 - protein, 15 aa, synthetic construct
RASKSVSILGTHLIH

SEQ ID NO: 1108 - protein, 7 aa, synthetic construct
AASNLES

SEQ ID NO: 1109 - protein, 9 aa, synthetic construct
QQSIEDPWT

SEQ ID NO: 1110 - protein, 11 aa, synthetic construct
SKSVSILGTHL

SEQ ID NO: 1111-1112 - skipped (2 entries)

SEQ ID NO: 1113 - protein, 119 aa, synthetic construct
QVQLVQSGAEVKKPGASVKVSCKASGFNIKSAYMHWVRQAPGQGLEWMGRIDPATGKTKYAPKFQARVTMTADTSTNTAYMELSSLRSEDTAVYYCARSLNWDYGLDYWGQGTLVTVSS

SEQ ID NO: 1114-1140 - skipped (27 entries)

SEQ ID NO: 1141 - protein, 5 aa, synthetic construct
SYAMS

SEQ ID NO: 1142 - protein, 17 aa, synthetic construct
HISNGGDYIYYADTVKG

SEQ ID NO: 1143 - protein, 12 aa, synthetic construct
PSYYSDPWFFDV

SEQ ID NO: 1144 - protein, 7 aa, synthetic construct
GFTFRSY

SEQ ID NO: 1145 - protein, 6 aa, synthetic construct
SNGGDY

SEQ ID NO: 1146 - protein, 10 aa, synthetic construct
GFTFRSYAMS

SEQ ID NO: 1147 - protein, 10 aa, synthetic construct
SAGSSVSFMH

SEQ ID NO: 1148 - protein, 7 aa, synthetic construct
DTSKLAS

SEQ ID NO: 1149 - protein, 9 aa, synthetic construct
LQGSGFPLT

SEQ ID NO: 1150 - protein, 6 aa, synthetic construct
GSSVSF

SEQ ID NO: 1151 - protein, 106 aa, synthetic construct
ENVLTQSPAIMSASPGEKVTMTCSAGSSVSFMHWYQQKSSTSPKLWIYDTSKLASGVPGRFSGSGSGNSFSLTISSMEAEDVAIYYCLQGSGFPLTFGSGTKLEIK

SEQ ID NO: 1152 - protein, 121 aa, synthetic construct
DVKLVESGEGLVKPGGSLKLSCAASGFTFRSYAMSWVRQTPEKRLEWVAHISNGGDYIYYADTVKGRFTISRDNARNTLYLQMSSLKSEDTAMYYCTRPSYYSDPWFFDVWGTGTTVTVSS

SEQ ID NO: 1153 - protein, 121 aa, synthetic construct
EVQLVESGGGLVQPGGSLRLSCAASGFTFRSYAMSWVRQAPGKGLEWVAHISNGGDYIYYADTVKGRFTISRDNAKNSLYLQMNSLRAEDTAVYYCTRPSYYSDPWFFDVWGQGTTVTVSS

SEQ ID NO: 1154 - protein, 121 aa, synthetic construct
QVQLVESGGGVVQPGRSLRLSCAASGFTFRSYAMSWVRQAPGKGLEWVAHISNGGDYIYYADTVKGRFTISRDNSKNTLYLQMSSLRAEDTAVYYCTRPSYYSDPWFFDVWGQGTTVTVSS

SEQ ID NO: 1155 - protein, 121 aa, synthetic construct
EVQLVESGGGLVQPGGSLRLSCAASGFTFRSYAMSWVRQAPGKGLEWVAHISNGGDYIYYADTVKGRFTISRDNSKNTLYLQMNSLRAEDTAVYYCTRPSYYSDPWFFDVWGQGTTVTVSS

SEQ ID NO: 1156 - protein, 121 aa, synthetic construct
QVQLVQSGSELKKPGASVKVSCKASGFTFRSYAMSWVRQAPGQGLEWVAHISNGGDYIYYADTVKGRFVISRDNSVNTLYLQISSLKAEDTAVYYCTRPSYYSDPWFFDVWGQGTTVTVSS

SEQ ID NO: 1157 - protein, 121 aa, synthetic construct
QVQLVQSGAEVKKPGASVKVSCKASGFTFRSYAMSWVRQAPGQRLEWVAHISNGGDYIYYADTVKGRFTITRDNSANTLYMELSSLRSEDTAVYYCTRPSYYSDPWFFDVWGQGTTVTVSS

SEQ ID NO: 1158 - protein, 106 aa, synthetic construct
ENVLTQSPATLSLSPGERATLSCSAGSSVSFMHWYQQKPGQAPKLLIYDTSKLASGIPARFSGSGSGNDFTLTISSLEPEDFAVYYCLQGSGFPLTFGQGTKLEIK

SEQ ID NO: 1159 - protein, 106 aa, synthetic construct
ENVLTQSPDFQSVTPKEKVTITCSAGSSVSFMHWYQQKPDQSPKLLIYDTSKLASGVPSRFSGSGSGNDFTLTINSLEAEDAATYYCLQGSGFPLTFGQGTKLEIK

SEQ ID NO: 1160 - protein, 106 aa, synthetic construct
DNQLTQSPSSLSASVGDRVTITCSAGSSVSFMHWYQQKPGKVPKLLIYDTSKLASGVPSRFSGSGSGNDFTLTISSLQPEDVATYYCLQGSGFPLTFGQGTKLEIK

SEQ ID NO: 1161 - protein, 106 aa, synthetic construct
ANQLTQSPSSLSASVGDRVTITCSAGSSVSFMHWYQQKPGKAPKLLIYDTSKLASGVPSRFSGSGSGNDFTLTISSLQPEDFATYYCLQGSGFPLTFGQGTKLEIK

SEQ ID NO: 1162 - protein, 106 aa, synthetic construct
DNVLTQSPDSLAVSLGERATINCSAGSSVSFMHWYQQKPGQPPKLLIYDTSKLASGVPDRFSGSGSGNDFTLTISSLQAEDVAVYYCLQGSGFPLTFGQGTKLEIK

SEQ ID NO: 1163-1167 - skipped (5 entries)

SEQ ID NO: 1168 - protein, 10 aa, synthetic construct
SASSSVSYMH

SEQ ID NO: 1169-1184 - skipped (16 entries)

SEQ ID NO: 1185 - protein, 5 aa, synthetic construct
GSWMN

SEQ ID NO: 1186 - protein, 17 aa, synthetic construct
RIYPGDGDTDYSGKFKG

SEQ ID NO: 1187 - protein, 12 aa, synthetic construct
SGYFNYVPVFDY

SEQ ID NO: 1188 - protein, 7 aa, synthetic construct
GYTFSGS

SEQ ID NO: 1189 - protein, 6 aa, synthetic construct
YPGDGD

SEQ ID NO: 1190 - protein, 10 aa, synthetic construct
GYTFSGSWMN

SEQ ID NO: 1191 - protein, 10 aa, synthetic construct
SANSTVGYIH

SEQ ID NO: 1192 - protein, 7 aa, synthetic construct
TTSNLAS

SEQ ID NO: 1193 - protein, 8 aa, synthetic construct
HQWSFYPT

SEQ ID NO: 1194 - protein, 6 aa, synthetic construct
NSTVGY

SEQ ID NO: 1195 - protein, 105 aa, synthetic construct
QIVLTQSPAIMSASLGEEIALTCSANSTVGYIHWYQQKSGTSPKLLIYTTSNLASGVPSRFSGSGSGTFYSLTISSVEAEDAADYFCHQWSFYPTFGGGTKLEIK

SEQ ID NO: 1196 - protein, 121 aa, synthetic construct
QIQLQQSGPEVVKPGASVQISCKASGYTFSGSWMNWVKQRPGKGLEWIGRIYPGDGDTDYSGKFKGRATLTADKSSSTAYMRLSSLTSEDSAVYFCARSGYFNYVPVFDYWGQGTTLSVSS

SEQ ID NO: 1197 - protein, 121 aa, synthetic construct
QIQLVQSGAEVKKPGASVKVSCKASGYTFSGSWMNWVRQAPGQGLEWIGRIYPGDGDTDYSGKFKGRATLTADKSTSTAYMELSSLRSEDTAVYYCARSGYFNYVPVFDYWGQGTTVTVSS

SEQ ID NO: 1198 - protein, 121 aa, synthetic construct
QIQLVQSGAEVKKPGSSVKVSCKASGYTFSGSWMNWVRQAPGQGLEWIGRIYPGDGDTDYSGKFKGRATLTADKSTSTAYMELSSLRSEDTAVYYCARSGYFNYVPVFDYWGQGTTVTVSS

SEQ ID NO: 1199 - protein, 121 aa, synthetic construct
EIQLVQSGAEVKKPGESLKISCKASGYTFSGSWMNWVRQMPGKGLEWIGRIYPGDGDTDYSGKFKGQATLSADKSISTAYLQWSSLKASDTAMYYCARSGYFNYVPVFDYWGQGTTVTVSS

SEQ ID NO: 1200 - protein, 121 aa, synthetic construct
QIQLVQSGSELKKPGASVKVSCKASGYTFSGSWMNWVRQAPGQGLEWIGRIYPGDGDTDYSGKFKGRAVLSADKSVSTAYLQISSLKAEDTAVYYCARSGYFNYVPVFDYWGQGTTVTVSS

SEQ ID NO: 1201 - protein, 121 aa, synthetic construct
QIQLVQSGSELKKPGASVKVSCKASGYTFSGSWMNWVRQAPGQGLEWIGRIYPGDGDTDYSGKFKGRAVLSADKSVSMAYLQISSLKAEDTAVYYCARSGYFNYVPVFDYWGQGTTVTVSS

SEQ ID NO: 1202 - protein, 121 aa, synthetic construct
EIQLVESGGGLVQPGRSLRLSCTASGYTFSGSWMNWVRQAPGKGLEWIGRIYPGDGDTDYSGKFKGRATLSADKSKSIAYLQMNSLKTEDTAVYYCARSGYFNYVPVFDYWGQGTTVTVSS

SEQ ID NO: 1203 - protein, 105 aa, synthetic construct
EIVLTQSPATLSLSPGERATLSCSANSTVGYIHWYQQKPGQAPKLLIYTTSNLASGIPARFSGSGSGTDYTLTISSLEPEDFAVYFCHQWSFYPTFGQGTKLEIK

SEQ ID NO: 1204 - protein, 105 aa, synthetic construct
DIQLTQSPSFLSASVGDRVTITCSANSTVGYIHWYQQKPGKAPKLLIYTTSNLASGVPSRFSGSGSGTEYTLTISSLQPEDFATYFCHQWSFYPTFGQGTKLEIK

SEQ ID NO: 1205 - protein, 105 aa, synthetic construct
EIVLTQSPATLSLSPGERATLSCSANSTVGYIHWYQQKPGQAPKLLIYTTSNLASGIPARFSGSGPGTDYTLTISSLEPEDFAVYFCHQWSFYPTFGQGTKLEIK

SEQ ID NO: 1206 - protein, 105 aa, synthetic construct
DIVLTQSPDSLAVSLGERATINCSANSTVGYIHWYQQKPGQPPKLLIYTTSNLASGVPDRFSGSGSGTDYTLTISSLQAEDVAVYFCHQWSFYPTFGQGTKLEIK

SEQ ID NO: 1207 - protein, 105 aa, synthetic construct
EIVLTQSPDFQSVTPKEKVTITCSANSTVGYIHWYQQKPDQSPKLLIYTTSNLASGVPSRFSGSGSGTDYTLTINSLEAEDAATYFCHQWSFYPTFGQGTKLEIK

SEQ ID NO: 1208-1287 - skipped (80 entries)

SEQ ID NO: 1288 - protein, 5 aa, synthetic construct
SYGMS

SEQ ID NO: 1289 - protein, 17 aa, synthetic construct
LISSGGSYTYYTDSVKG

SEQ ID NO: 1290 - protein, 8 aa, synthetic construct
HGGNFFDY

SEQ ID NO: 1291 - protein, 7 aa, synthetic construct
GFTFRSY

SEQ ID NO: 1292 - protein, 6 aa, synthetic construct
SSGGSY

SEQ ID NO: 1293 - protein, 10 aa, synthetic construct
GFTFRSYGMS

SEQ ID NO: 1294 - protein, 10 aa, synthetic construct
SVSSSVSYMH

SEQ ID NO: 1295 - protein, 7 aa, synthetic construct
DTSKLAS

SEQ ID NO: 1296 - protein, 10 aa, synthetic construct
QQWSSNPQYT

SEQ ID NO: 1297 - protein, 6 aa, synthetic construct
SSSVSY

SEQ ID NO: 1298 - protein, 5 aa, synthetic construct
SSWMN

SEQ ID NO: 1299 - protein, 17 aa, synthetic construct
RIYPGDGDTKYNGKFKG

SEQ ID NO: 1300 - protein, 10 aa, synthetic construct
RGTGGWYFDV

SEQ ID NO: 1301 - protein, 10 aa, synthetic construct
RGTGGWYFDV

SEQ ID NO: 1302 - protein, 7 aa, synthetic construct
GYAFSSS

SEQ ID NO: 1303 - protein, 6 aa, synthetic construct
YPGDGD

SEQ ID NO: 1304 - protein, 10 aa, synthetic construct
GYAFSSSWMN

SEQ ID NO: 1305 - protein, 15 aa, synthetic construct
RASESVDSSGNSFMH

SEQ ID NO: 1306 - protein, 7 aa, synthetic construct
RASNLES

SEQ ID NO: 1307 - protein, 9 aa, synthetic construct
QQSFDDPFT

SEQ ID NO: 1308 - protein, 11 aa, synthetic construct
SESVDSSGNSF

SEQ ID NO: 1309 - protein, 246 aa, synthetic construct
QVQLVQSGAEVKKPGSSVKVSCKASGHDFDKFYIHWVRQAPGQGLEWMGRVSAGSGNVKYNEKFKGRVTITADTSTSTAYMELSSLRSEDTAVYYCAGSYYSYDVLDYWGQGTTVTVSSGGGGSGGGGSGGGGSGGGGSDIQMTQSPSFLSASVGDRVTITCKASQNVGNRVAWYQQKPGKAPKALIYSSSHRYKGVPSRFSGSGSGTEFTLTISSLQPEDFATYFCQQFKSYPLTFGQGTKLEIK

SEQ ID NO: 1310 - protein, 119 aa, synthetic construct; identical to SEQ ID NO: 94

SEQ ID NO: 1311 - protein, 119 aa, synthetic construct
QVQLVQSGAEVKKPGSSVKVSCKASGTDFKLTYIHWVRQAPGQGLEWMGRIFPGSGNVKYNEKFKGRVTITADTSTSTAYMELSSLRSEDTAVYYCAVSYYSYDVLDYWGQGTTVTVSS

SEQ ID NO: 1312 - protein, 119 aa, synthetic construct
QVQLVQSGAEVKKPGSSVKVSCKASGHDFRLTYIHWVRQAPGQGLEWMGRISAGSGNVKYNEKFKGRVTITADTSTSTAYMELSSLRSEDTAVYYCAVSYYSYDVLDYWGQGTTVTVSS

SEQ ID NO: 1313 - protein, 107 aa, synthetic construct; identical to SEQ ID NO: 90

SEQ ID NO: 1314 - protein, 107 aa, synthetic construct; identical to SEQ ID NO: 141

SEQ ID NO: 1315 - protein, 5 aa, synthetic construct
AYGVN

SEQ ID NO: 1316 - protein, 16 aa, synthetic construct
MIWGDGNTDYNSALKS

SEQ ID NO: 1317 - protein, 12 aa, synthetic construct
DRVTATLYAMDY

SEQ ID NO: 1318 - protein, 7 aa, synthetic construct
GFSLTAY

SEQ ID NO: 1319 - protein, 5 aa, synthetic construct
WGDGN

SEQ ID NO: 1320 - protein, 10 aa, synthetic construct
GFSLTAYGVN

SEQ ID NO: 1321 - protein, 11 aa, synthetic construct
SASQGISNYLN

SEQ ID NO: 1322 - protein, 7 aa, synthetic construct
YTSSLHS

SEQ ID NO: 1323 - protein, 9 aa, synthetic construct
QQYSKLPRT

SEQ ID NO: 1324 - protein, 107 aa, synthetic construct
DIQMTQSPSSLSASVGDRVTITCSASQGISNYLNWYQQTPGKAPKLLIYYTSSLHSGVPSRFSGSGSGTDYTFTISSLQPEDIATYYCQQYSKLPRTFGQGTKLQIT

SEQ ID NO: 1325 - protein, 120 aa, synthetic construct
QVQLQESGPGLVRPSQTLSLTCTVSGFSLTAYGVNWVRQPPGRGLEWLGMIWGDGNTDYNSALKSRVTMLKDTSKNQFSLRLSSVTAADTAVYYCARDRVTATLYAMDYWGQGSLVTVSS

SEQ ID NO: 1326 - protein, 246 aa, synthetic construct
QVQLVQSGAEVKKPGSSVKVSCKASGHDFRLTYIHWVRQAPGQGLEWMGRVSAGSGNTKYNEKFKGRVTITADTSTSTAYMELSSLRSEDTAVYYCAVSYYSYDVLDYWGQGTTVTVSSGGGGSGGGGSGGGGSGGGGSDIQMTQSPSFLSASVGDRVTITCKASQNVGDRVVWHQQKPGKAPKALIYSSSHRYKGVPSRFSGSGSGTEFTLTISSLQPEDFATYFCQQFKSYPLTFGQGTKLEIK

SEQ ID NO: 1327 - protein, 246 aa, synthetic construct
QVQLVQSGAEVKKPGSSVKVSCKASGHDFRLTYIHWVRQAPGQGLEWMGRVSAGSGNVKYNEKFKGRVTITADTSTSTAYMELSSLRSEDTAVYYCAVSYYSYDVLDYWGQGTTVTVSSGGGGSGGGGSGGGGSGGGGSDIQMTQSPSFLSASVGDRVTITCKASQNVGNRVVWHQQKPGKAPKALIYSSSHRYKGVPSRFSGSGSGTEFTLTISSLQPEDFATYFCQQFKSYPLTFGQGTKLEIK

SEQ ID NO: 1328 - protein, 246 aa, synthetic construct
QVQLVQSGAEVKKPGSSVKVSCKASGHDFRLTYIHWVRQAPGQGLEWMGRIYAGSGNVKYNEKFKGRVTITADTSTSTAYMELSSLRSEDTAVYYCAVSYYSYDVLDYWGQGTTVTVSSGGGGSGGGGSGGGGSGGGGSDIQMTQSPSFLSASVGDRVTITCKASQNVADRVVWHQQKPGKAPKALIYSSSHRYKGVPSRFSGSGSGTEFTLTISSLQPEDFATYFCQQFKSYPLTFGQGTKLEIK

SEQ ID NO: 1329 - protein, 246 aa, synthetic construct
QVQLVQSGAEVKKPGSSVKVSCKASGHDFKLTYIHWVRQAPGQGLEWMGRVSAGSGNTKYNEKFKGRVTITADTSTSTAYMELSSLRSEDTAVYYCAVSYYSYDVLDYWGQGTTVTVSSGGGGSGGGGSGGGGSGGGGSDIQMTQSPSFLSASVGDRVTITCKASQNVGDRVAWHQQKPGKAPKALIYSSSHRYKGVPSRFSGSGSGTEFTLTISSLQPEDFATYFCQQFKSYPLTFGQGTKLEIK

SEQ ID NO: 1330 - protein, 246 aa, synthetic construct
QVQLVQSGAEVKKPGSSVKVSCKASGHDFKLTYIHWVRQAPGQGLEWMGRVSAGSGNTKYNEKFKGRVTITADTSTSTAYMELSSLRSEDTAVYYCAVSYYSYDVLDYWGQGTTVTVSSGGGGSGGGGSGGGGSGGGGSDIQMTQSPSFLSASVGDRVTITCKASQNVDNRVAWHQQKPGKAPKALIYSSSHRYKGVPSRFSGSGSGTEFTLTISSLQPEDFATYFCQQFKSYPLTFGQGTKLEIK

SEQ ID NO: 1331 - protein, 246 aa, synthetic construct
QVQLVQSGAEVKKPGSSVKVSCKASGHDFRLTYIHWVRQAPGQGLEWMGRVSAGSGNVKYNEKFKGRVTITADTSTSTAYMELSSLRSEDTAVYYCAVSYYSYDVLDYWGQGTTVTVSSGGGGSGGGGSGGGGSGGGGSDIQMTQSPSFLSASVGDRVTITCKASQNVADRVVWHQQKPGKAPKALIYSSSHRYKGVPSRFSGSGSGTEFTLTISSLQPEDFATYFCQQFKSYPLTFGQGTKLEIK

SEQ ID NO: 1332 - protein, 246 aa, synthetic construct
QVQLVQSGAEVKKPGSSVKVSCKASGHDFRLTYIHWVRQAPGQGLEWMGRVYAGSGNTKYNEKFKGRVTITADTSTSTAYMELSSLRSEDTAVYYCAVSYYSYDVLDYWGQGTTVTVSSGGGGSGGGGSGGGGSGGGGSDIQMTQSPSFLSASVGDRVTITCKASQNVEDRVVWHQQKPGKAPKALIYSSSHRYKGVPSRFSGSGSGTEFTLTISSLQPEDFATYFCQQFKSYPLTFGQGTKLEIK

SEQ ID NO: 1333 - protein, 246 aa, synthetic construct
QVQLVQSGAEVKKPGSSVKVSCKASGHDFKLTYIHWVRQAPGQGLEWMGRVSAGSGNTKYNEKFKGRVTITADTSTSTAYMELSSLRSEDTAVYYCAVSYYSYDVLDYWGQGTTVTVSSGGGGSGGGGSGGGGSGGGGSDIQMTQSPSFLSASVGDRVTITCKASQNVADRVVWHQQKPGKAPKALIYSSSHRYKGVPSRFSGSGSGTEFTLTISSLQPEDFATYFCQQFKSYPLTFGQGTKLEIK

SEQ ID NO: 1334 - protein, 246 aa, synthetic construct
QVQLVQSGAEVKKPGSSVKVSCKASGHDFKLTYIHWVRQAPGQGLEWMGRISAGSGNTKYNEKFKGRVTITADTSTSTAYMELSSLRSEDTAVYYCAVSYYSYDVLDYWGQGTTVTVSSGGGGSGGGGSGGGGSGGGGSDIQMTQSPSFLSASVGDRVTITCKASQNVGDRVVWHQQKPGKAPKALIYSSSHRYKGVPSRFSGSGSGTEFTLTISSLQPEDFATYFCQQFKSYPLTFGQGTKLEIK

SEQ ID NO: 1335 - protein, 246 aa, synthetic construct
QVQLVQSGAEVKKPGSSVKVSCKASGHDFKLTYIHWVRQAPGQGLEWMGRIYAGSGNTKYNEKFKGRVTITADTSTSTAYMELSSLRSEDTAVYYCAVSYYSYDVLDYWGQGTTVTVSSGGGGSGGGGSGGGGSGGGGSDIQMTQSPSFLSASVGDRVTITCKASQNVGDRVVWHQQKPGKAPKALIYSSSHRYKGVPSRFSGSGSGTEFTLTISSLQPEDFATYFCQQFKSYPLTFGQGTKLEIK

SEQ ID NO: 1336 - protein, 246 aa, synthetic construct
QVQLVQSGAEVKKPGSSVKVSCKASGTDFKLTYIHWVRQAPGQGLEWMGRIFPGSGNVKYNEKFKGRVTITADTSTSTAYMELSSLRSEDTAVYYCAVSYYSYDVLDYWGQGTTVTVSSGGGGSGGGGSGGGGSGGGGSDIQMTQSPSFLSASVGDRVTITCKASQNVDNRVAWYQQKPGKAPKALIYSSSHRYKGVPSRFSGSGSGTEFTLTISSLQPEDFATYFCQQFKSYPLTFGQGTKLEIK

SEQ ID NO: 1337 - protein, 246 aa, synthetic construct
QVQLVQSGAEVKKPGSSVKVSCKASGHDFRLTYIHWVRQAPGQGLEWMGRISAGSGNVKYNEKFKGRVTITADTSTSTAYMELSSLRSEDTAVYYCAVSYYSYDVLDYWGQGTTVTVSSGGGGSGGGGSGGGGSGGGGSDIQMTQSPSFLSASVGDRVTITCKASQNVADRVAWYQQKPGKAPKALIYSSSHRYKGVPSRFSGSGSGTEFTLTISSLQPEDFATYFCQQFKSYPLTFGQGTKLEIK

SEQ ID NO: 1338 - protein, 243 aa, synthetic construct
EVQLVESGGGLVQPGGSLRLSCAASGFTFSNFGMHWVRQAPGKGLEWVSYISSGSSTIYYADTLKGRFTISRDNSKNTLYLQMNSLRAEDTAVYYCARRGEGAMDYWGQGTTVTVSSGGGGSGGGGSGGGGSGGGGSDNQLTQSPSSLSASVGDRVTITCRASSSVNYIYWYQQKPGKAPKLLIYYTSNLAPGVPSRFSGSGSGNDYTLTISSLQPEDFATYYCQQFTSSPFTFGQGTKLEIK

SEQ ID NO: 1339 - protein, 242 aa, synthetic construct
EVQLVESGGGLVQPGGSLRLSCAASGFTFSNFGMHWVRQAPGKGLEWVSYISSGSSTIYYADTLKGRFTISRDNSKNTLYLQMNSLRAEDTAVYYCARRGEGAMDYWGQGTTVTVSSGGGGSGGGGSGGGGSGGGGSSNELTQPPSVSVSPGQTARITCRASSSVNYIYWYQQKSGQAPVLVIYYTSNLAPGIPERFSGSGSGNMYTLTISGAQVEDEADYYCQQFTSSPFTFGTGTKVTVL

SEQ ID NO: 1340 - protein, 243 aa, synthetic construct
QVQLVESGGGVVQPGRSLRLSCAASGFTFSNFGMHWVRQAPGKGLEWVAYISSGSSTIYYADTLKGRFTISRDNSKNTLYLQMNSLRAEDTAVYYCARRGEGAMDYWGQGTTVTVSSGGGGSGGGGSGGGGSGGGGSDNQLTQSPSFLSASVGDRVTITCRASSSVNYIYWYQQKPGKAPKLLIYYTSNLAPGVPSRFSGSGSGNEYTLTISSLQPEDFATYYCQQFTSSPFTFGQGTKLEIK

SEQ ID NO: 1341 - protein, 243 aa, synthetic construct
QVQLVESGGGVVQPGRSLRLSCAASGFTFSNFGMHWVRQAPGKGLEWVAYISSGSSTIYYADTLKGRFTISRDNSKNTLYLQMNSLRAEDTAVYYCARRGEGAMDYWGQGTTVTVSSGGGGSGGGGSGGGGSGGGGSDNQLTQSPSSLSASVGDRVTITCRASSSVNYIYWYQQKPGKAPKLLIYYTSNLAPGVPSRFSGSGSGNDYTLTISSLQPEDFATYYCQQFTSSPFTFGQGTKLEIK

SEQ ID NO: 1342 - protein, 242 aa, synthetic construct
QVQLVESGGGVVQPGRSLRLSCAASGFTFSNFGMHWVRQAPGKGLEWVAYISSGSSTIYYADTLKGRFTISRDNSKNTLYLQMNSLRAEDTAVYYCARRGEGAMDYWGQGTTVTVSSGGGGSGGGGSGGGGSGGGGSSNELTQPPSVSVSPGQTARITCRASSSVNYIYWYQQKSGQAPVLVIYYTSNLAPGIPERFSGSGSGNMYTLTISGAQVEDEADYYCQQFTSSPFTFGTGTKVTVL

SEQ ID NO: 1343 - skipped

SEQ ID NO: 1344 - protein, 119 aa, synthetic construct
QVQLVQSGAEVKKPGSSVKVSCKASGHDFRLTYIHWVRQAPGQGLEWMGRVSAGSGNTKYNEKFKGRVTITADTSTSTAYMELSSLRSEDTAVYYCAVSYYSYDVLDYWGQGTTVTVSS

SEQ ID NO: 1345 - skipped

SEQ ID NO: 1346 - protein, 119 aa, synthetic construct; identical to SEQ ID NO: 168

SEQ ID NO: 1347 - protein, 107 aa, synthetic construct
DIQMTQSPSFLSASVGDRVTITCKASQNVGNRVVWHQQKPGKAPKALIYSSSHRYKGVPSRFSGSGSGTEFTLTISSLQPEDFATYFCQQFKSYPLTFGQGTKLEIK

SEQ ID NO: 1348 - protein, 119 aa, synthetic construct
QVQLVQSGAEVKKPGSSVKVSCKASGHDFRLTYIHWVRQAPGQGLEWMGRIYAGSGNVKYNEKFKGRVTITADTSTSTAYMELSSLRSEDTAVYYCAVSYYSYDVLDYWGQGTTVTVSS

SEQ ID NO: 1349 - protein, 107 aa, synthetic construct; identical to SEQ ID NO: 173

SEQ ID NO: 1350 - protein, 119 aa, synthetic construct
QVQLVQSGAEVKKPGSSVKVSCKASGHDFKLTYIHWVRQAPGQGLEWMGRVSAGSGNTKYNEKFKGRVTITADTSTSTAYMELSSLRSEDTAVYYCAVSYYSYDVLDYWGQGTTVTVSS

SEQ ID NO: 1351 - protein, 107 aa, synthetic construct; identical to SEQ ID NO: 160

SEQ ID NO: 1352 - skipped

SEQ ID NO: 1353 - protein, 107 aa, synthetic construct; identical to SEQ ID NO: 199

SEQ ID NO: 1354-1355 - skipped (2 entries)

SEQ ID NO: 1356 - protein, 119 aa, synthetic construct
QVQLVQSGAEVKKPGSSVKVSCKASGHDFRLTYIHWVRQAPGQGLEWMGRVYAGSGNTKYNEKFKGRVTITADTSTSTAYMELSSLRSEDTAVYYCAVSYYSYDVLDYWGQGTTVTVSS

SEQ ID NO: 1357 - protein, 107 aa, synthetic construct
DIQMTQSPSFLSASVGDRVTITCKASQNVEDRVVWHQQKPGKAPKALIYSSSHRYKGVPSRFSGSGSGTEFTLTISSLQPEDFATYFCQQFKSYPLTFGQGTKLEIK

SEQ ID NO: 1358-1359 - skipped (2 entries)

SEQ ID NO: 1360 - protein, 119 aa, synthetic construct
QVQLVQSGAEVKKPGSSVKVSCKASGHDFKLTYIHWVRQAPGQGLEWMGRISAGSGNTKYNEKFKGRVTITADTSTSTAYMELSSLRSEDTAVYYCAVSYYSYDVLDYWGQGTTVTVSS

SEQ ID NO: 1361 - protein, 107 aa, synthetic construct
DIQMTQSPSFLSASVGDRVTITCKASQNVGDRVVWHQQKPGKAPKALIYSSSHRYKGVPSRFSGSGSGTEFTLTISSLQPEDFATYFCQQFKSYPLTFGQGTKLEIK

SEQ ID NO: 1362 - protein, 119 aa, synthetic construct
QVQLVQSGAEVKKPGSSVKVSCKASGHDFKLTYIHWVRQAPGQGLEWMGRIYAGSGNTKYNEKFKGRVTITADTSTSTAYMELSSLRSEDTAVYYCAVSYYSYDVLDYWGQGTTVTVSS

SEQ ID NO: 1363-1364 - skipped (2 entries)

SEQ ID NO: 1365 - protein, 107 aa, synthetic construct
DIQMTQSPSFLSASVGDRVTITCRASQNVDNRLGWHQQKPGKAPKALIYSSSHRYKGVPSRFSGSGSGTEFTLTISSLQPEDFATYFCQQFKSYPLTFGQGTKLEIK

SEQ ID NO: 1366 - skipped

SEQ ID NO: 1367 - protein, 107 aa, synthetic construct
DIQMTQSPSFLSASVGDRVTITCKASQNVDNRVAWHQQKPGKAPKALIYAASSLQKGVPSRFSGSGSGTEFTLTISSLQPEDFATYFCQQFKSYPLTFGQGTKLEIK

SEQ ID NO: 1368 - skipped

SEQ ID NO: 1369 - protein, 107 aa, synthetic construct
DIQMTQSPSFLSASVGDRVTITCKASQNVDNRVAWHQQKPGKAPKALIYSSSHRYKGVPSRFSGSGSGTEFTLTISSLQPEDFATYFCLQHNSYPLTFGQGTKLEIK

SEQ ID NO: 1370 - protein, 119 aa, synthetic construct
QVQLVQSGAEVKKPGSSVKVSCKASGHDFKLTYIHWVRQAPGQGLEWMGRVSAGSGNVNYAQKFQGRVTITADTSTSTAYMELSSLRSEDTAVYYCAVSYYSYDVLDYWGQGTTVTVSS

SEQ ID NO: 1371-2000 - skipped (630 entries)

SEQ ID NO: 2001 - protein, 5 aa, synthetic construct
DYGIH

SEQ ID NO: 2002 - protein, 17 aa, synthetic construct
VISYHGSNKYYARSVKG

SEQ ID NO: 2003 - protein, 8 aa, synthetic construct
EIPFGMDV

SEQ ID NO: 2004 - protein, 16 aa, synthetic construct
RSSQSLLHSDGYNYLD

SEQ ID NO: 2005 - protein, 7 aa, synthetic construct
LGSNRAS

SEQ ID NO: 2006 - protein, 9 aa, synthetic construct
MQALQTPLT

SEQ ID NO: 2007 - protein, 117 aa, synthetic construct
QVQLVESGGGVVQSGRSLRLSCAASGFTFSDYGIHWVRQAPGKGLEWVAVISYHGSNKYYARSVKGRFTVSRDNSKNTLYLQMNSLRAEDTAVYYCAREIPFGMDVWGQGTTVTVSS

SEQ ID NO: 2008 - protein, 112 aa, synthetic construct
DIVMTQTPLSLPVTPGEPASISCRSSQSLLHSDGYNYLDWYLQKPGQSPQLLIYLGSNRASGVPDRFSGSGSGTDFTLTISRVEAEDVGVYYCMQALQTPLTFGGGTKVDIK

SEQ ID NO: 2009 - protein, 244 aa, synthetic construct
QVQLVESGGGVVQSGRSLRLSCAASGFTFSDYGIHWVRQAPGKGLEWVAVISYHGSNKYYARSVKGRFTVSRDNSKNTLYLQMNSLRAEDTAVYYCAREIPFGMDVWGQGTTVTVSSGGGGSGGGGSGGGGSDIVMTQTPLSLPVTPGEPASISCRSSQSLLHSDGYNYLDWYLQKPGQSPQLLIYLGSNRASGVPDRFSGSGSGTDFTLTISRVEAEDVGVYYCMQALQTPLTFGGGTKVDIK

SEQ ID NO: 2010 - protein, 15 aa, synthetic construct
GGGGSGGGGSGGGGS

SEQ ID NO: 2011 - protein, 5 aa, synthetic construct
GYYMH

SEQ ID NO: 2012 - protein, 17 aa, synthetic construct
WINPNSGDTNYAQKFQG

SEQ ID NO: 2013 - protein, 12 aa, synthetic construct
DANIAALDAFEI

SEQ ID NO: 2014 - protein, 11 aa, synthetic construct
RASQSISSYLN

SEQ ID NO: 2015 - protein, 7 aa, synthetic construct
AASSLQS

SEQ ID NO: 2016 - protein, 9 aa, synthetic construct
QQSYSTPLT

SEQ ID NO: 2017 - protein, 121 aa, synthetic construct
QVQLVQSGAEVKKPGASVKVSCKASGYTFTGYYMHWVRQAPGQGLEWMGWINPNSGDTNYAQKFQGRVTMTRDTSISTAYMELSRLTSDDTAVYYCARDANIAALDAFEIWGQGTMVTVSS

SEQ ID NO: 2018 - protein, 107 aa, synthetic construct [sequence omitted]

SEQ ID NO: 2019 - protein, 5 aa, synthetic construct
SYGMH

SEQ ID NO: 2020 - protein, 17 aa, synthetic construct
VISYHGRDTYYARSVKG

SEQ ID NO: 2021 - protein, 15 aa, synthetic construct
DGATVTSYYYSGMDV

SEQ ID NO: 2022 - protein, 11 aa, synthetic construct
RASQGISNYLA

SEQ ID NO: 2023 - protein, 7 aa, synthetic construct
LASSLQS

SEQ ID NO: 2024 - protein, 9 aa, synthetic construct
QQYNFYPFT

SEQ ID NO: 2025 - protein, 125 aa, synthetic construct
QVQLVESGGGVVQPGRSLRLSCAASGFTFSSYGMHWVRQAPGKGLEWVAVISYHGRDTYYARSVKGRFTISRDNSKNTLYLHMNSLRAEDTAVYYCARDGATVTSYYYSGMDVWGQGTTVTVSSK

SEQ ID NO: 2026 - protein, 107 aa, synthetic construct
DIQMTQSPSSLSASVGDRVTITCRASQGISNYLAWFQQKPGKAPKSLIYLASSLQSGVPSKFSGSGSGTDFTLTISSLQPEDFATYYCQQYNFYPFTFGPGTKVDIK

SEQ ID NO: 2027 - protein, 246 aa, synthetic construct
QVQLVESGGGVVQPGRSLRLSCAASGFTFSSYGMHWVRQAPGKGLEWVAVISYHGRDTYYARSVKGRFTISRDNSKNTLYLHMNSLRAEDTAVYYCARDGATVTSYYYSGMDVWGQGTTVTVSSGGGGSGGGGSGGGGSDIQMTQSPSSLSASVGDRVTITCRASQGISNYLAWFQQKPGKAPKSLIYLASSLQSGVPSKFSGSGSGTDFTLTISSLQPEDFATYYCQQYNFYPFTFGPGTKVDIK

SEQ ID NO: 2028 - protein, 5 aa, synthetic construct
SYYWS

SEQ ID NO: 2029 - protein, 16 aa, synthetic construct
YVYYSGTTNYNPSLKS

SEQ ID NO: 2030 - protein, 10 aa, synthetic construct
IAVTGFYFDY

SEQ ID NO: 2031 - protein, 12 aa, synthetic construct
RASQRVNNNYLA

SEQ ID NO: 2032 - protein, 7 aa, synthetic construct
GASSRAT

SEQ ID NO: 2033 - protein, 9 aa, synthetic construct
QQYDRSPLT

SEQ ID NO: 2034 - protein, 118 aa, synthetic construct
QVQLQESGPGLVKPSETLSLTCTVSGGSISSYYWSWIRQPPGKGLEWIGYVYYSGTTNYNPSLKSRVTISVDTSKNQFSLKLSSVTAADTAVYYCASIAVTGFYFDYWGQGTLVTVSS

SEQ ID NO: 2035 - protein, 108 aa, synthetic construct
EIVLTQSPGTLSLSPGERVTLSCRASQRVNNNYLAWYQQRPGQAPRLLIYGASSRATGIPDRFSGSGSGTDFTLTISRLEPEDFAVYYCQQYDRSPLTFGGGTKLEIK

SEQ ID NO: 2036 - protein, 241 aa, synthetic construct
QVQLQESGPGLVKPSETLSLTCTVSGGSISSYYWSWIRQPPGKGLEWIGYVYYSGTTNYNPSLKSRVTISVDTSKNQFSLKLSSVTAADTAVYYCASIAVTGFYFDYWGQGTLVTVSSGGGGSGGGGSGGGGSEIVLTQSPGTLSLSPGERVTLSCRASQRVNNNYLAWYQQRPGQAPRLLIYGASSRATGIPDRFSGSGSGTDFTLTISRLEPEDFAVYYCQQYDRSPLTFGGGTKLEIK

SEQ ID NO: 2037 - protein, 16 aa, synthetic construct
YIYYSGRTNYYPSLKS

SEQ ID NO: 2038 - protein, 10 aa, synthetic construct
IAVAGFFFDY

SEQ ID NO: 2039 - protein, 12 aa, synthetic construct
RASQSVNKNYLA

SEQ ID NO: 2040 - protein, 118 aa, synthetic construct
QVQLQESGPGLVKPSETLSLTCTVSGGSISSYYWSWIRQPPGKGLEWIGYIYYSGRTNYYPSLKSRVTISIDTSKNQFSLKLSSVTAADTAVYYCARIAVAGFFFDYWGQGTLVTVSS

SEQ ID NO: 2041 - protein, 108 aa, synthetic construct
EIVLTQSPGTLSLSPGERATLSCRASQSVNKNYLAWYQQKPGQAPRLLIYGASSRATGIPDRFSGSGSGTDFTLTISRLEPEDFAVYYCQQYDRSPLTFGGGTKLEIK

SEQ ID NO: 2042 - protein, 241 aa, synthetic construct
QVQLQESGPGLVKPSETLSLTCTVSGGSISSYYWSWIRQPPGKGLEWIGYIYYSGRTNYYPSLKSRVTISIDTSKNQFSLKLSSVTAADTAVYYCARIAVAGFFFDYWGQGTLVTVSSGGGGSGGGGSGGGGSEIVLTQSPGTLSLSPGERATLSCRASQSVNKNYLAWYQQKPGQAPRLLIYGASSRATGIPDRFSGSGSGTDFTLTISRLEPEDFAVYYCQQYDRSPLTFGGGTKLEIK

SEQ ID NO: 2043 - protein, 5 aa, synthetic construct
SFYWS

SEQ ID NO: 2044 - protein, 16 aa, synthetic construct
YIYYSGTTNYNPSLKS

SEQ ID NO: 2045 - protein, 118 aa, synthetic construct
QVQLQESGPGLVKPSETLSLTCTVSGASISSFYWSWIRQPPGKGLEWIGYIYYSGTTNYNPSLKSRVTISVDTSKNQFSLKLSSVTAADTAVYYCARIAVAGFFFDYWGQGTLVTVSS

SEQ ID NO: 2046 - protein, 108 aa, synthetic construct
EIVLTQSPGTLSLSPGERATLSCRASQSVNKNYLAWYQQKPGQAPRLLIYGASSRATGIPDRFSGSGSGTDFTLTISRLEPEDFAVYYCQQYDRSPLTFGGGTKVEIK

SEQ ID NO: 2047 - protein, 241 aa, synthetic construct
QVQLQESGPGLVKPSETLSLTCTVSGASISSFYWSWIRQPPGKGLEWIGYIYYSGTTNYNPSLKSRVTISVDTSKNQFSLKLSSVTAADTAVYYCARIAVAGFFFDYWGQGTLVTVSSGGGGSGGGGSGGGGSEIVLTQSPGTLSLSPGERATLSCRASQSVNKNYLAWYQQKPGQAPRLLIYGASSRATGIPDRFSGSGSGTDFTLTISRLEPEDFAVYYCQQYDRSPLTFGGGTKVEIK

SEQ ID NO: 2048 - protein, 118 aa, synthetic construct
QVQLQESGPGLVKPSQTLSLTCTVSGASISSFYWSWIRQPPGKGLEWIGYIYYSGTTNYNPSLKSRVTISVDTSKNQFSLKLSSVTAADTAVYYCARIAVAGFFFDYWGQGTLVTVSS

SEQ ID NO: 2049 - protein, 108 aa, synthetic construct; identical to SEQ ID NO: 2046

SEQ ID NO: 2050 - protein, 241 aa, synthetic construct
QVQLQESGPGLVKPSQTLSLTCTVSGASISSFYWSWIRQPPGKGLEWIGYIYYSGTTNYNPSLKSRVTISVDTSKNQFSLKLSSVTAADTAVYYCARIAVAGFFFDYWGQGTLVTVSSGGGGSGGGGSGGGGSEIVLTQSPGTLSLSPGERATLSCRASQSVNKNYLAWYQQKPGQAPRLLIYGASSRATGIPDRFSGSGSGTDFTLTISRLEPEDFAVYYCQQYDRSPLTFGGGTKVEIK

SEQ ID NO: 2051 - protein, 119 aa, synthetic construct
QVQLQEWGPGLVKPSETLSLTCTVSGASISSFYWSWIRQPPGKGLEWIGYIYYSGTTNYNPSLKSRVTISVDTSKNQLSLKLSSVTAADTAVYYCARIAVAGFFFDYWGQGTLVTVSSK

SEQ ID NO: 2052 - protein, 108 aa, synthetic construct
EIVLTQSPGTLSLSPGERATLSCRASQSVNKNYLAWYQQKPGQAPRLLIYGASSRATGIPDRFSGSGSGTDFTLTISRLEPEDFAVYYCQQYDRSPLTFGGGTKVDIK

SEQ ID NO: 2053 - protein, 241 aa, synthetic construct
QVQLQEWGPGLVKPSETLSLTCTVSGASISSFYWSWIRQPPGKGLEWIGYIYYSGTTNYNPSLKSRVTISVDTSKNQLSLKLSSVTAADTAVYYCARIAVAGFFFDYWGQGTLVTVSSGGGGSGGGGSGGGGSEIVLTQSPGTLSLSPGERATLSCRASQSVNKNYLAWYQQKPGQAPRLLIYGASSRATGIPDRFSGSGSGTDFTLTISRLEPEDFAVYYCQQYDRSPLTFGGGTKVDIK

SEQ ID NO: 2054 - protein, 118 aa, synthetic construct; identical to SEQ ID NO: 2045

SEQ ID NO: 2055 - protein, 108 aa, synthetic construct
EIVLTQSPGTLSLSPGESATLSCRASQSVNKNYLAWYQQKPGQAPRLLIYGASSRATGIPDRFSGSGSGTDFTLTISRLEPEDFAVYYCQQYDRSPLTFGGGTRLEIK

SEQ ID NO: 2056 - protein, 241 aa, synthetic construct
QVQLQESGPGLVKPSETLSLTCTVSGASISSFYWSWIRQPPGKGLEWIGYIYYSGTTNYNPSLKSRVTISVDTSKNQFSLKLSSVTAADTAVYYCARIAVAGFFFDYWGQGTLVTVSSGGGGSGGGGSGGGGSEIVLTQSPGTLSLSPGESATLSCRASQSVNKNYLAWYQQKPGQAPRLLIYGASSRATGIPDRFSGSGSGTDFTLTISRLEPEDFAVYYCQQYDRSPLTFGGGTRLEIK

SEQ ID NO: 2057 - protein, 16 aa, synthetic construct
YIFYNGITNYNPSLKS

SEQ ID NO: 2058 - protein, 10 aa, synthetic construct
IHSGSFSFDY

SEQ ID NO: 2059 - protein, 12 aa, synthetic construct
RASQSVSRGYLA

SEQ ID NO: 2060 - protein, 9 aa, synthetic construct
QQYDTSPIT

SEQ ID NO: 2061 - protein, 118 aa, synthetic construct
QVQLQESGPGLVKPSQTLSLTCTVSGGSISSYYWSWIRQPPGKGLEWIGYIFYNGITNYNPSLKSRVTISLDTSKNQFSLKLSSVTAADTAKYYCARIHSGSFSFDYWDQGTLVTVSS

SEQ ID NO: 2062 - protein, 108 aa, synthetic construct
EIVMTQSPGTLSLSPGERATLSCRASQSVSRGYLAWYQQKPGQAPRLLIYGASSRATDIPDRFSGSGSGTDFTLTISRLEPEDFAVYYCQQYDTSPITFGQGTKVEIK

SEQ ID NO: 2063 - protein, 241 aa, synthetic construct
QVQLQESGPGLVKPSQTLSLTCTVSGGSISSYYWSWIRQPPGKGLEWIGYIFYNGITNYNPSLKSRVTISLDTSKNQFSLKLSSVTAADTAKYYCARIHSGSFSFDYWDQGTLVTVSSGGGGSGGGGSGGGGSEIVMTQSPGTLSLSPGERATLSCRASQSVSRGYLAWYQQKPGQAPRLLIYGASSRATDIPDRFSGSGSGTDFTLTISRLEPEDFAVYYCQQYDTSPITFGQGTKVEIK

SEQ ID NO: 2064 - protein, 5 aa, synthetic construct
NAGMS

SEQ ID NO: 2065 - protein, 19 aa, synthetic construct
RIKNKIDGGTTDFAAPVKG

SEQ ID NO: 2066 - protein, 10 aa, synthetic construct
RGWYGDYFDY

SEQ ID NO: 2067 - protein, 16 aa, synthetic construct
RSSQSLLHSNGYNYLD

SEQ ID NO: 2068 - protein, 7 aa, synthetic construct
LGSNRAS

SEQ ID NO: 2069 - protein, 9 aa, synthetic construct
MQALQTPFT

SEQ ID NO: 2070 - protein, 121 aa, synthetic construct
EVQLVESGGGLVKPGGSLRLSCAASGFIFNNAGMSWVRQAPGKGLEWVGRIKNKIDGGTTDFAAPVKGRFTISRDDSKNTLYLQMNSLKAEDTAVYYCTARGWYGDYFDYWGQGTLVTVSS

SEQ ID NO: 2071 - protein, 112 aa, synthetic construct
DIVMTQTPLSLPVTPGEPASISCRSSQSLLHSNGYNYLDWYLQKPGQSPQLLIYLGSNRASGVPDRFSGSGSGTDFTLKISRVEAEDVGIYYCMQALQTPFTFGPGTKVEIK

SEQ ID NO: 2072 - protein, 248 aa, synthetic construct
EVQLVESGGGLVKPGGSLRLSCAASGFIFNNAGMSWVRQAPGKGLEWVGRIKNKIDGGTTDFAAPVKGRFTISRDDSKNTLYLQMNSLKAEDTAVYYCTARGWYGDYFDYWGQGTLVTVSSGGGGSGGGGSGGGGSDIVMTQTPLSLPVTPGEPASISCRSSQSLLHSNGYNYLDWYLQKPGQSPQLLIYLGSNRASGVPDRFSGSGSGTDFTLKISRVEAEDVGIYYCMQALQTPFTFGPGTKVEIK

SEQ ID NO: 2073 - protein, 5 aa, synthetic construct
SYDIH

SEQ ID NO: 2074 - protein, 17 aa, synthetic construct
VISSHGSNKNYARSVKG

SEQ ID NO: 2075 - protein, 18 aa, synthetic construct
DGYSGNDPFYYYYHGMDV

SEQ ID NO: 2076 - protein, 9 aa, synthetic construct
QQSFTTPLT

SEQ ID NO: 2077 - protein, 127 aa, synthetic construct
QVQLVESGGGVVQPGRSLRLSCAASGFSFSSYDIHWVRQAPGKGLEWVAVISSHGSNKNYARSVKGRFTISRDNSKNTLYLQMNSLKAEDTAVYYCARDGYSGNDPFYYYYHGMDVWGQGTTVTVSS

SEQ ID NO: 2078 - protein, 107 aa, synthetic construct
DIQMTQSPSSLSASVGDRVTITCRASQSISSYLNWYQQKPGKAPKLLIYAASSLQSGVPSRFSGSGSGTDFSLTISSLQPEDFATYYCQQSFTTPLTFGGGTKVEIK

SEQ ID NO: 2079 - protein, 249 aa, synthetic construct
QVQLVESGGGVVQPGRSLRLSCAASGFSFSSYDIHWVRQAPGKGLEWVAVISSHGSNKNYARSVKGRFTISRDNSKNTLYLQMNSLKAEDTAVYYCARDGYSGNDPFYYYYHGMDVWGQGTTVTVSSGGGGSGGGGSGGGGSDIQMTQSPSSLSASVGDRVTITCRASQSISSYLNWYQQKPGKAPKLLIYAASSLQSGVPSRFSGSGSGTDFSLTISSLQPEDFATYYCQQSFTTPLTFGGGTKVEIK

SEQ ID NO: 2080 - protein, 5 aa, synthetic construct
SYYMH

SEQ ID NO: 2081 - protein, 17 aa, synthetic construct
IINPSDGSTNYAQNFQG

SEQ ID NO: 2082 - protein, 14 aa, synthetic construct
GGNSAFYSYYDMDV

SEQ ID NO: 2083 - protein, 16 aa, synthetic construct
RSSQSLVYRDGNTYLS

SEQ ID NO: 2084 - protein, 7 aa, synthetic construct
KVSNWQS

SEQ ID NO: 2085 - protein, 9 aa, synthetic construct
MQGTHWPPT

SEQ ID NO: 2086 - protein, 123 aa, synthetic construct
QVQLVQSGAEVKKPGASVKVSCKASGYTFTSYYMHWVRQAPGQGLEWMGIINPSDGSTNYAQNFQGRVTMTRDTSTNTVYMELSSLRSEDTAVYYCARGGNSAFYSYYDMDVWGQGTTVTVSS

SEQ ID NO: 2087 - protein, 112 aa, synthetic construct
DVVMTQSPLSLPVTLGQPASISCRSSQSLVYRDGNTYLSWFQQRPGQSPRRLIYKVSNWQSGVPDRFSGSGSGTDFTLKISRVEAEDVGVYFCMQGTHWPPTFGQGTKVEIK

SEQ ID NO: 2088 - protein, 250 aa, synthetic construct
QVQLVQSGAEVKKPGASVKVSCKASGYTFTSYYMHWVRQAPGQGLEWMGIINPSDGSTNYAQNFQGRVTMTRDTSTNTVYMELSSLRSEDTAVYYCARGGNSAFYSYYDMDVWGQGTTVTVSSGGGGSGGGGSGGGGSDVVMTQSPLSLPVTLGQPASISCRSSQSLVYRDGNTYLSWFQQRPGQSPRRLIYKVSNWQSGVPDRFSGSGSGTDFTLKISRVEAEDVGVYFCMQGTHWPPTFGQGTKVEIK

SEQ ID NO: 2089 - protein, 5 aa, synthetic construct
NYYMH

SEQ ID NO: 2090 - protein, 17 aa, synthetic construct
IINPSDGSTSYAQKFQG

SEQ ID NO: 2091 - protein, 123 aa, synthetic construct
QVQLVQSGAEVKKPGASVKVSCKASGYTFTNYYMHWVRQAPGLGLEWMGIINPSDGSTSYAQKFQGRVTMTRDTSTNTVYMDLSSLRSEDTAVYYCARGGNSAFYSYYDMDVWGQGTTVTVSS

SEQ ID NO: 2092 - protein, 112 aa, synthetic construct
DVVMTQTPLSLPVTLGQPASISCRSSQSLVYRDGNTYLSWFQQRPGQSPRRLIYKVSNWQSGVPDRFSGGGSGTDFTLKISRVEAEDVGVYYCMQGTHWPPTFGQGTKVEIK

SEQ ID NO: 2093 - protein, 250 aa, synthetic construct
QVQLVQSGAEVKKPGASVKVSCKASGYTFTNYYMHWVRQAPGLGLEWMGIINPSDGSTSYAQKFQGRVTMTRDTSTNTVYMDLSSLRSEDTAVYYCARGGNSAFYSYYDMDVWGQGTTVTVSSGGGGSGGGGSGGGGSDVVMTQTPLSLPVTLGQPASISCRSSQSLVYRDGNTYLSWFQQRPGQSPRRLIYKVSNWQSGVPDRFSGGGSGTDFTLKISRVEAEDVGVYYCMQGTHWPPTFGQGTKVEIK

SEQ ID NO: 2094 - protein, 5 aa, synthetic construct
GYYIH

SEQ ID NO: 2095 - protein, 17 aa, synthetic construct
IINPSDGSTSYGQNFQG

SEQ ID NO: 2096 - protein, 16 aa, synthetic construct
RSSQSLAYRDGNTYLS

SEQ ID NO: 2097 - protein, 123 aa, synthetic construct
QVQLVQSGAEVKKPGASVKVSCKASGYTFTGYYIHWVRQAPGQGLEWMGIINPSDGSTSYGQNFQGRVTMTRDTSTNTVYMELSSLRSEDTAVYYCARGGNSAFYSYYDMDVWGQGTTVTVSS

SEQ ID NO: 2098 - protein, 112 aa, synthetic construct
DVVMTQSPLSLPVTLGQPASISCRSSQSLAYRDGNTYLSWFQQRPGQSPRRLIYKVSNWQSGVPDRFSGSGSGTDFTLKISRVEAEDVGVYFCMQGTHWPPTFGQGTKVEIK

SEQ ID NO: 2099 - protein, 250 aa, synthetic construct
QVQLVQSGAEVKKPGASVKVSCKASGYTFTGYYIHWVRQAPGQGLEWMGIINPSDGSTSYGQNFQGRVTMTRDTSTNTVYMELSSLRSEDTAVYYCARGGNSAFYSYYDMDVWGQGTTVTVSSGGGGSGGGGSGGGGSDVVMTQSPLSLPVTLGQPASISCRSSQSLAYRDGNTYLSWFQQRPGQSPRRLIYKVSNWQSGVPDRFSGSGSGTDFTLKISRVEAEDVGVYFCMQGTHWPPTFGQGTKVEIK

SEQ ID NO: 2100 - protein, 5 aa, synthetic construct
GHYMH

SEQ ID NO: 2101 - protein, 17 aa, synthetic construct
IINPSDGSTNYAQKFQG

SEQ ID NO: 2102 - protein, 14 aa, synthetic construct
GTTVVHYSYYDMDV

SEQ ID NO: 2103 - protein, 16 aa, synthetic construct
RSSQSLVYRDGNTYLT

SEQ ID NO: 2104 - protein, 123 aa, synthetic construct
QVQLVQSGAEVKKPGASVKVSCKASGYTFTGHYMHWVRQAPGQGLEWMGIINPSDGSTNYAQKFQGRVTMTRDTSTSTVYMELRSLRSEDTAVYYCTRGTTVVHYSYYDMDVWGQGTTVTVSS

SEQ ID NO: 2105 - protein, 112 aa, synthetic construct
DVVMTQTPLSLPVTLGQPASISCRSSQSLVYRDGNTYLTWFQQRPGQSPRRLIYKVSNWQSGVPDRFSGSGSGTDFTLKISRVEAEDVGVYYCMQGTHWPPTFGGGTKVEIK

SEQ ID NO: 2106 - protein, 250 aa, synthetic construct
QVQLVQSGAEVKKPGASVKVSCKASGYTFTGHYMHWVRQAPGQGLEWMGIINPSDGSTNYAQKFQGRVTMTRDTSTSTVYMELRSLRSEDTAVYYCTRGTTVVHYSYYDMDVWGQGTTVTVSSGGGGSGGGGSGGGGSDVVMTQTPLSLPVTLGQPASISCRSSQSLVYRDGNTYLTWFQQRPGQSPRRLIYKVSNWQSGVPDRFSGSGSGTDFTLKISRVEAEDVGVYYCMQGTHWPPTFGGGTKVEIK

SEQ ID NO: 2107 - protein, 5 aa, synthetic construct
NYFMH

SEQ ID NO: 2108 - protein, 17 aa, synthetic construct
IINPSDGSTSYAQNFQG

SEQ ID NO: 2109 - protein, 7 aa, synthetic construct
RVSNWQS

SEQ ID NO: 2110 - protein, 9 aa, synthetic construct
MQGTYWPPT

SEQ ID NO: 2111 - protein, 123 aa, synthetic construct
QVQLVQSGAEVKKPGASVKVSCKASGYTFTNYFMHWVRQAPGLGLEWMGIINPSDGSTSYAQNFQGRVTMTRDTSTNTVYMELSSLRSEDTAVYYCARGGNSAFYSYYDMDVWGQGTTVTVSS

SEQ ID NO: 2112 - protein, 112 aa, synthetic construct
DVVMTQSPLSLPVTLGQPASISCRSSQSLVYRDGNTYLSWFQQRPGQSPRRLIYRVSNWQSGVPDRFSGSGSGTDFTLKISRVEAEDVGVYFCMQGTYWPPTFGQGTKVDIK

SEQ ID NO: 2113 - protein, 250 aa, synthetic construct
QVQLVQSGAEVKKPGASVKVSCKASGYTFTNYFMHWVRQAPGLGLEWMGIINPSDGSTSYAQNFQGRVTMTRDTSTNTVYMELSSLRSEDTAVYYCARGGNSAFYSYYDMDVWGQGTTVTVSSGGGGSGGGGSGGGGSDVVMTQSPLSLPVTLGQPASISCRSSQSLVYRDGNTYLSWFQQRPGQSPRRLIYRVSNWQSGVPDRFSGSGSGTDFTLKISRVEAEDVGVYFCMQGTYWPPTFGQGTKVDIK

SEQ ID NO: 2114 - protein, 5 aa, synthetic construct
NYGMH

SEQ ID NO: 2115 - protein, 17 aa, synthetic construct
VISHHGSSKYYARSVKG

SEQ ID NO: 2116 - protein, 9 aa, synthetic construct
DWWELVFDY

SEQ ID NO: 2117 - protein, 16 aa, synthetic construct
KSSQSLLHSDGKTFLY

SEQ ID NO: 2118 - protein, 7 aa, synthetic construct
EVSNRFS

SEQ ID NO: 2119 - protein, 9 aa, synthetic construct
LQGIHLPFT

SEQ ID NO: 2120 - protein, 118 aa, synthetic construct
QVQLVESGGGAVQPGRSLRLSCAASGFTFSNYGMHWVRQAPGKGLEWVAVISHHGSSKYYARSVKGRFTISRDNSKNTLYLEMNSLRAEDTAVYYCARDWWELVFDYWGQGTLVTVSS

SEQ ID NO: 2121 - protein, 112 aa, synthetic construct
DIVMTQTPLSLSVTPGQPASISCKSSQSLLHSDGKTFLYWYLQKPGQPPQLLIYEVSNRFSGVPDRFSGSGSGTDFTLKISRVEAEDVGVYYCLQGIHLPFTFGPGTKVEIK

SEQ ID NO: 2122 - protein, 245 aa, synthetic construct
QVQLVESGGGAVQPGRSLRLSCAASGFTFSNYGMHWVRQAPGKGLEWVAVISHHGSSKYYARSVKGRFTISRDNSKNTLYLEMNSLRAEDTAVYYCARDWWELVFDYWGQGTLVTVSSGGGGSGGGGSGGGGSDIVMTQTPLSLSVTPGQPASISCKSSQSLLHSDGKTFLYWYLQKPGQPPQLLIYEVSNRFSGVPDRFSGSGSGTDFTLKISRVEAEDVGVYYCLQGIHLPFTFGPGTKVEIK

SEQ ID NO: 2123 - protein, 7 aa, synthetic construct
NSRMGVS

SEQ ID NO: 2124 - protein, 16 aa, synthetic construct
HIFSNDGKSYSTSLKS

SEQ ID NO: 2125 - protein, 15 aa, synthetic construct
YNYDSSGYYYSFFDY

SEQ ID NO: 2126 - protein, 9 aa, synthetic construct
QQGYSSPFT

SEQ ID NO: 2127 - protein, 125 aa, synthetic construct
QVTLKESGPMLVKPTETLTLTCTVSGFSLSNSRMGVSWIRQPPGRALEWLAHIFSNDGKSYSTSLKSRLTISKDTSKSQVVLTMTNMDPVDTATYYCARYNYDSSGYYYSFFDYWGQGTLVTVSS

SEQ ID NO: 2128 - protein, 107 aa, synthetic construct
DIQMTQSPSSLSASVGDRVTITCRASQSISSYLNWYQQKPGKAPKLLIYAASSLQSGVPSRFSGSGSGTDFTLTISSLQPEDFATYYCQQGYSSPFTFGGGTKVEIK

SEQ ID NO: 2129 - protein, 247 aa, synthetic construct
QVTLKESGPMLVKPTETLTLTCTVSGFSLSNSRMGVSWIRQPPGRALEWLAHIFSNDGKSYSTSLKSRLTISKDTSKSQVVLTMTNMDPVDTATYYCARYNYDSSGYYYSFFDYWGQGTLVTVSSGGGGSGGGGSGGGGSDIQMTQSPSSLSASVGDRVTITCRASQSISSYLNWYQQKPGKAPKLLIYAASSLQSGVPSRFSGSGSGTDFTLTISSLQPEDFATYYCQQGYSSPFTFGGGTKVEIK

SEQ ID NO: 2130 - protein, 7 aa, synthetic construct
NARMGVS

SEQ ID NO: 2131 - protein, 16 aa, synthetic construct
HIFSTDEKSYSTSLKS

SEQ ID NO: 2132 - protein, 15 aa, synthetic construct
YYYDSSGYYYSFFDY

SEQ ID NO: 2133 - protein, 11 aa, synthetic construct
RASQSIRSYLN

SEQ ID NO: 2134 - protein, 7 aa, synthetic construct
GASNLQS

SEQ ID NO: 2135 - protein, 9 aa, synthetic construct
QQSYSSPFT

SEQ ID NO: 2136 - protein, 125 aa, synthetic construct
QVTLKESGPVLVKPTETLTLTCTVSGFSLSNARMGVSWLRQPPGKALEWLAHIFSTDEKSYSTSLKSRLTISKDTSKSQVVLTMTNMDPVDTATYYCARYYYDSSGYYYSFFDYWGQGTLVTVSS

SEQ ID NO: 2137 - protein, 107 aa, synthetic construct
DIQMTQSPSSLSASVGDRVTITCRASQSIRSYLNWYQQKPGKAPKLLIYGASNLQSGVPSRFSGSGSGTDFTLTISSLQPEDFATYYCQQSYSSPFTFGGGTKVEIK

SEQ ID NO: 2138 - protein, 247 aa, synthetic construct
QVTLKESGPVLVKPTETLTLTCTVSGFSLSNARMGVSWLRQPPGKALEWLAHIFSTDEKSYSTSLKSRLTISKDTSKSQVVLTMTNMDPVDTATYYCARYYYDSSGYYYSFFDYWGQGTLVTVSSGGGGSGGGGSGGGGSDIQMTQSPSSLSASVGDRVTITCRASQSIRSYLNWYQQKPGKAPKLLIYGASNLQSGVPSRFSGSGSGTDFTLTISSLQPEDFATYYCQQSYSSPFTFGGGTKVEIK

SEQ ID NO: 2139 - protein, 5 aa, synthetic construct
SYYIH

SEQ ID NO: 2140 - protein, 17 aa, synthetic construct
IINPSGGSKSYAQKFRG

SEQ ID NO: 2141 - protein, 12 aa, synthetic construct
SMSTVTSDAFDI

SEQ ID NO: 2142 - protein, 11 aa, synthetic construct
RASQSISNYLN

SEQ ID NO: 2143 - protein, 9 aa, synthetic construct
QQSYSAPLT

SEQ ID NO: 2144 - protein, 121 aa, synthetic construct
QVQLVQSGAEVKKPGASVKVSCKASGYAFTSYYIHWVRQAPGQGLEWMGIINPSGGSKSYAQKFRGRVTMTRDTSTSTVYMELSSLTSEDTAVYYCARSMSTVTSDAFDIWGQGTMVTVSS

SEQ ID NO: 2145 - protein, 107 aa, synthetic construct
DIQMTQSPSSLSASVGDRVTITCRASQSISNYLNWYQQKPGKAPKLLIYAASSLQSGVPSRFSGSGSGTEFTLTISSLQPEDFATYYCQQSYSAPLTFGGGTKVDIK

SEQ ID NO: 2146 - protein, 243 aa, synthetic construct
QVQLVQSGAEVKKPGASVKVSCKASGYAFTSYYIHWVRQAPGQGLEWMGIINPSGGSKSYAQKFRGRVTMTRDTSTSTVYMELSSLTSEDTAVYYCARSMSTVTSDAFDIWGQGTMVTVSSGGGGSGGGGSGGGGSDIQMTQSPSSLSASVGDRVTITCRASQSISNYLNWYQQKPGKAPKLLIYAASSLQSGVPSRFSGSGSGTEFTLTISSLQPEDFATYYCQQSYSAPLTFGGGTKVDIK

SEQ ID NO: 2147 - protein, 118 aa, synthetic construct
QVQLQESGPGLVKPSETLSLTCTVSGGSISSYYWSWIRQPPGKCLEWIGYVYYSGTTNYNPSLKSRVTISVDTSKNQFSLKLSSVTAADTAVYYCASIAVTGFYFDYWGQGTLVTVSS

SEQ ID NO: 2148 - protein, 108 aa, synthetic construct
EIVLTQSPGTLSLSPGERVTLSCRASQRVNNNYLAWYQQRPGQAPRLLIYGASSRATGIPDRFSGSGSGTDFTLTISRLEPEDFAVYYCQQYDRSPLTFGCGTKLEIK

SEQ ID NO: 2149 - protein, 241 aa, synthetic construct
QVQLQESGPGLVKPSETLSLTCTVSGGSISSYYWSWIRQPPGKCLEWIGYVYYSGTTNYNPSLKSRVTISVDTSKNQFSLKLSSVTAADTAVYYCASIAVTGFYFDYWGQGTLVTVSSGGGGSGGGGSGGGGSEIVLTQSPGTLSLSPGERVTLSCRASQRVNNNYLAWYQQRPGQAPRLLIYGASSRATGIPDRFSGSGSGTDFTLTISRLEPEDFAVYYCQQYDRSPLTFGCGTKLEIK

SEQ ID NO: 2150 - protein, 17 aa, synthetic construct
IINPSEGSTSYAQKFQG

SEQ ID NO: 2151 - protein, 17 aa, synthetic construct
IINPSDASTSYAQKFQG

SEQ ID NO: 2152 - protein, 16 aa, synthetic construct
RSSQSLVYREGNTYLS

SEQ ID NO: 2153 - protein, 16 aa, synthetic construct
RSSQSLVYRDANTYLS

SEQ ID NO: 2154 - protein, 16 aa, synthetic construct
RSSQSLVYRDGQTYLS

SEQ ID NO: 2155 - protein, 16 aa, synthetic construct
RSSQSLVYRDGNAYLS

SEQ ID NO: 2156 - protein, 123 aa, synthetic construct
QVQLVQSGAEVKKPGASVKVSCKASGYTFTNYYMHWVRQAPGQGLEWMGIINPSDGSTSYAQKFQGRVTMTRDTSTNTVYMDLSSLRSEDTAVYYCARGGNSAFYSYYDMDVWGQGTTVTVSS

SEQ ID NO: 2157 - protein, 123 aa, synthetic construct
QVQLVQSGAEVKKPGASVKVSCKASGYTFTNYYMHWVRQAPGLGLEWMGIINPSEGSTSYAQKFQGRVTMTRDTSTNTVYMDLSSLRSEDTAVYYCARGGNSAFYSYYDMDVWGQGTTVTVSS

SEQ ID NO: 2158 - protein, 123 aa, synthetic construct
QVQLVQSGAEVKKPGASVKVSCKASGYTFTNYYMHWVRQAPGLGLEWMGIINPSDASTSYAQKFQGRVTMTRDTSTNTVYMDLSSLRSEDTAVYYCARGGNSAFYSYYDMDVWGQGTTVTVSS

SEQ ID NO: 2159 - protein, 123 aa, synthetic construct
QVQLVQSGAEVKKPGASVKVSCKASGYTFTNYYMHWVRQAPGQGLEWMGIINPSEGSTSYAQKFQGRVTMTRDTSTNTVYMDLSSLRSEDTAVYYCARGGNSAFYSYYDMDVWGQGTTVTVSS

SEQ ID NO: 2160 - protein, 122 aa, synthetic construct
QVQLVQSGAEVKKPGASVKVSCKASGYTFTNYYMHWVRQAPGQGLEWMGIINPSDASTSYAQKFQGRVTMTRDTSTNTVYMDLSSLRSEDTAVYYCARGGNSAFYSYYDMDVWGQGTTVTVS

SEQ ID NO: 2161 - protein, 123 aa, synthetic construct
QVQLVQSGAEVKKPGASVKVSCKASGYTFTNYYMHWVRQAPGLCLEWMGIINPSDGSTSYAQKFQGRVTMTRDTSTNTVYMDLSSLRSEDTAVYYCARGGNSAFYSYYDMDVWGQGTTVTVSS

SEQ ID NO: 2162 - protein, 123 aa, synthetic construct
QVQLVQSGAEVKKPGASVKVSCKASGYTFTNYYMHWVRQAPGQCLEWMGIINPSDGSTSYAQKFQGRVTMTRDTSTNTVYMDLSSLRSEDTAVYYCARGGNSAFYSYYDMDVWGQGTTVTVSS

SEQ ID NO: 2163 - protein, 123 aa, synthetic construct
QVQLVQSGAEVKKPGASVKVSCKASGYTFTNYYMHWVRQAPGLCLEWMGIINPSEGSTSYAQKFQGRVTMTRDTSTNTVYMDLSSLRSEDTAVYYCARGGNSAFYSYYDMDVWGQGTTVTVSS

SEQ ID NO: 2164 - protein, 123 aa, synthetic construct
QVQLVQSGAEVKKPGASVKVSCKASGYTFTNYYMHWVRQAPGLCLEWMGIINPSDASTSYAQKFQGRVTMTRDTSTNTVYMDLSSLRSEDTAVYYCARGGNSAFYSYYDMDVWGQGTTVTVSS

SEQ ID NO: 2165 - protein, 123 aa, synthetic construct
QVQLVQSGAEVKKPGASVKVSCKASGYTFTNYYMHWVRQAPGQCLEWMGIINPSEGSTSYAQKFQGRVTMTRDTSTNTVYMDLSSLRSEDTAVYYCARGGNSAFYSYYDMDVWGQGTTVTVSS

SEQ ID NO: 2166 - protein, 123 aa, synthetic construct
QVQLVQSGAEVKKPGASVKVSCKASGYTFTNYYMHWVRQAPGQCLEWMGIINPSDASTSYAQKFQGRVTMTRDTSTNTVYMDLSSLRSEDTAVYYCARGGNSAFYSYYDMDVWGQGTTVTVSS

SEQ ID NO: 2167 - protein, 112 aa, synthetic construct
DVVMTQTPLSLPVTLGQPASISCRSSQSLVYREGNTYLSWFQQRPGQSPRRLIYKVSNWQSGVPDRFSGGGSGTDFTLKISRVEAEDVGVYYCMQGTHWPPTFGQGTKVEIK

SEQ ID NO: 2168 - protein, 112 aa, synthetic construct
DVVMTQTPLSLPVTLGQPASISCRSSQSLVYRDANTYLSWFQQRPGQSPRRLIYKVSNWQSGVPDRFSGGGSGTDFTLKISRVEAEDVGVYYCMQGTHWPPTFGQGTKVEIK

SEQ ID NO: 2169 - protein, 112 aa, synthetic construct
DVVMTQTPLSLPVTLGQPASISCRSSQSLVYRDGQTYLSWFQQRPGQSPRRLIYKVSNWQSGVPDRFSGGGSGTDFTLKISRVEAEDVGVYYCMQGTHWPPTFGQGTKVEIK

SEQ ID NO: 2170 - protein, 114 aa, Homo sapiens; identical to SEQ ID NO: 238

SEQ ID NO: 2171 - protein, 112 aa, synthetic construct
DVVMTQTPLSLPVTLGQPASISCRSSQSLVYRDGNTYLSWFQQRPGQSPRRLIYKVSNWQSGVPDRFSGSGSGTDFTLKISRVEAEDVGVYYCMQGTHWPPTFGQGTKVEIK

SEQ ID NO: 2172 - protein, 112 aa, synthetic construct
DVVMTQTPLSLPVTLGQPASISCRSSQSLVYREGNTYLSWFQQRPGQSPRRLIYKVSNWQSGVPDRFSGSGSGTDFTLKISRVEAEDVGVYYCMQGTHWPPTFGQGTKVEIK

SEQ ID NO: 2173 - protein, 112 aa, synthetic construct
DVVMTQTPLSLPVTLGQPASISCRSSQSLVYRDANTYLSWFQQRPGQSPRRLIYKVSNWQSGVPDRFSGSGSGTDFTLKISRVEAEDVGVYYCMQGTHWPPTFGQGTKVEIK

SEQ ID NO: 2174 - protein, 112 aa, synthetic construct
DVVMTQTPLSLPVTLGQPASISCRSSQSLVYRDGNTYLSWFQQRPGQSPRRLIYKVSNWQSGVPDRFSGGGSGTDFTLKISRVEAEDVGVYYCMQGTHWPPTFGCGTKVEIK

SEQ ID NO: 2175 - protein, 112 aa, synthetic construct
DVVMTQTPLSLPVTLGQPASISCRSSQSLVYREGNTYLSWFQQRPGQSPRRLIYKVSNWQSGVPDRFSGGGSGTDFTLKISRVEAEDVGVYYCMQGTHWPPTFGCGTKVEIK

SEQ ID NO: 2176 - protein, 112 aa, synthetic construct
DVVMTQTPLSLPVTLGQPASISCRSSQSLVYRDANTYLSWFQQRPGQSPRRLIYKVSNWQSGVPDRFSGGGSGTDFTLKISRVEAEDVGVYYCMQGTHWPPTFGCGTKVEIK

SEQ ID NO: 2177 - protein, 112 aa, synthetic construct
DVVMTQTPLSLPVTLGQPASISCRSSQSLVYRDGQTYLSWFQQRPGQSPRRLIYKVSNWQSGVPDRFSGGGSGTDFTLKISRVEAEDVGVYYCMQGTHWPPTFGCGTKVEIK

SEQ ID NO: 2178 - protein, 112 aa, synthetic construct
DVVMTQTPLSLPVTLGQPASISCRSSQSLVYRDGNAYLSWFQQRPGQSPRRLIYKVSNWQSGVPDRFSGGGSGTDFTLKISRVEAEDVGVYYCMQGTHWPPTFGCGTKVEIK

SEQ ID NO: 2179 - protein, 112 aa, synthetic construct
DVVMTQTPLSLPVTLGQPASISCRSSQSLVYRDGNTYLSWFQQRPGQSPRRLIYKVSNWQSGVPDRFSGSGSGTDFTLKISRVEAEDVGVYYCMQGTHWPPTFGCGTKVEIK

SEQ ID NO: 2180 - protein, 77 aa, synthetic construct
MAPRRARGCRTLGLPALLLLLLLRPPATRGITCPPPMSVEHADIWVKSYSLYSRERYICNSGFKRKAGTSSLTECVL

SEQ ID NO: 2181 - protein, 112 aa, synthetic construct
DVVMTQTPLSLPVTLGQPASISCRSSQSLVYRDANTYLSWFQQRPGQSPRRLIYKVSNWQSGVPDRFSGSGSGTDFTLKISRVEAEDVGVYYCMQGTHWPPTFGCGTKVEIK

SEQ ID NO: 2182 - protein, 250 aa, synthetic construct
QVQLVQSGAEVKKPGASVKVSCKASGYTFTNYYMHWVRQAPGLGLEWMGIINPSDGSTSYAQKFQGRVTMTRDTSTNTVYMDLSSLRSEDTAVYYCARGGNSAFYSYYDMDVWGQGTTVTVSSGGGGSGGGGSGGGGSDVVMTQTPLSLPVTLGQPASISCRSSQSLVYREGNTYLSWFQQRPGQSPRRLIYKVSNWQSGVPDRFSGGGSGTDFTLKISRVEAEDVGVYYCMQGTHWPPTFGQGTKVEIK

SEQ ID NO: 2183 - protein, 250 aa, synthetic construct
QVQLVQSGAEVKKPGASVKVSCKASGYTFTNYYMHWVRQAPGLGLEWMGIINPSDGSTSYAQKFQGRVTMTRDTSTNTVYMDLSSLRSEDTAVYYCARGGNSAFYSYYDMDVWGQGTTVTVSSGGGGSGGGGSGGGGSDVVMTQTPLSLPVTLGQPASISCRSSQSLVYRDANTYLSWFQQRPGQSPRRLIYKVSNWQSGVPDRFSGGGSGTDFTLKISRVEAEDVGVYYCMQGTHWPPTFGQGTKVEIK

SEQ ID NO: 2184 - protein, 250 aa, synthetic construct
QVQLVQSGAEVKKPGASVKVSCKASGYTFTNYYMHWVRQAPGLGLEWMGIINPSDGSTSYAQKFQGRVTMTRDTSTNTVYMDLSSLRSEDTAVYYCARGGNSAFYSYYDMDVWGQGTTVTVSSGGGGSGGGGSGGGGSDVVMTQTPLSLPVTLGQPASISCRSSQSLVYRDGQTYLSWFQQRPGQSPRRLIYKVSNWQSGVPDRFSGGGSGTDFTLKISRVEAEDVGVYYCMQGTHWPPTFGQGTKVEIK

SEQ ID NO: 2185 - protein, 250 aa, synthetic construct
QVQLVQSGAEVKKPGASVKVSCKASGYTFTNYYMHWVRQAPGLGLEWMGIINPSDGSTSYAQKFQGRVTMTRDTSTNTVYMDLSSLRSEDTAVYYCARGGNSAFYSYYDMDVWGQGTTVTVSSGGGGSGGGGSGGGGSDVVMTQTPLSLPVTLGQPASISCRSSQSLVYRDGNAYLSWFQQRPGQSPRRLIYKVSNWQSGVPDRFSGGGSGTDFTLKISRVEAEDVGVYYCMQGTHWPPTFGQGTKVEIK

SEQ ID NO: 2186 - protein, 250 aa, synthetic construct
QVQLVQSGAEVKKPGASVKVSCKASGYTFTNYYMHWVRQAPGLGLEWMGIINPSDGSTSYAQKFQGRVTMTRDTSTNTVYMDLSSLRSEDTAVYYCARGGNSAFYSYYDMDVWGQGTTVTVSSGGGGSGGGGSGGGGSDVVMTQTPLSLPVTLGQPASISCRSSQSLVYRDGNTYLSWFQQRPGQSPRRLIYKVSNWQSGVPDRFSGSGSGTDFTLKISRVEAEDVGVYYCMQGTHWPPTFGQGTKVEIK

SEQ ID NO: 2187 - protein, 250 aa, synthetic construct
QVQLVQSGAEVKKPGASVKVSCKASGYTFTNYYMHWVRQAPGQGLEWMGIINPSDGSTSYAQKFQGRVTMTRDTSTNTVYMDLSSLRSEDTAVYYCARGGNSAFYSYYDMDVWGQGTTVTVSSGGGGSGGGGSGGGGSDVVMTQTPLSLPVTLGQPASISCRSSQSLVYRDGNTYLSWFQQRPGQSPRRLIYKVSNWQSGVPDRFSGGGSGTDFTLKISRVEAEDVGVYYCMQGTHWPPTFGQGTKVEIK

SEQ ID NO: 2188 - protein, 250 aa, synthetic construct
QVQLVQSGAEVKKPGASVKVSCKASGYTFTNYYMHWVRQAPGLGLEWMGIINPSEGSTSYAQKFQGRVTMTRDTSTNTVYMDLSSLRSEDTAVYYCARGGNSAFYSYYDMDVWGQGTTVTVSSGGGGSGGGGSGGGGSDVVMTQTPLSLPVTLGQPASISCRSSQSLVYRDGNTYLSWFQQRPGQSPRRLIYKVSNWQSGVPDRFSGGGSGTDFTLKISRVEAEDVGVYYCMQGTHWPPTFGQGTKVEIK

SEQ ID NO: 2189 - protein, 250 aa, synthetic construct
QVQLVQSGAEVKKPGASVKVSCKASGYTFTNYYMHWVRQAPGLGLEWMGIINPSDASTSYAQKFQGRVTMTRDTSTNTVYMDLSSLRSEDTAVYYCARGGNSAFYSYYDMDVWGQGTTVTVSSGGGGSGGGGSGGGGSDVVMTQTPLSLPVTLGQPASISCRSSQSLVYRDGNTYLSWFQQRPGQSPRRLIYKVSNWQSGVPDRFSGGGSGTDFTLKISRVEAEDVGVYYCMQGTHWPPTFGQGTKVEIK

SEQ ID NO: 2190 - protein, 250 aa, synthetic construct
QVQLVQSGAEVKKPGASVKVSCKASGYTFTNYYMHWVRQAPGQGLEWMGIINPSDGSTSYAQKFQGRVTMTRDTSTNTVYMDLSSLRSEDTAVYYCARGGNSAFYSYYDMDVWGQGTTVTVSSGGGGSGGGGSGGGGSDVVMTQTPLSLPVTLGQPASISCRSSQSLVYRDGNTYLSWFQQRPGQSPRRLIYKVSNWQSGVPDRFSGSGSGTDFTLKISRVEAEDVGVYYCMQGTHWPPTFGQGTKVEIK

SEQ ID NO: 2191 - protein, 133 aa, Homo sapiens [sequence omitted]

SEQ ID NO: 2192 - protein, 157 aa, Homo sapiens
YFGKLESKLSVIRNLNDQVLFIDQGNRPLFEDMTDSDCRDNAPRTIFIISMYKDSQPRGMAVTISVKCEKISTLSCENKIISFKEMNPPDNIKDTKSDIIFFQRSVPGHDNKMQFESSSYEGYFLACEKERDLFKLILKKEDELGDRSIMFTVQNED

SEQ ID NO: 2193 - protein, 133 aa, Homo sapiens [sequence omitted]

SEQ ID NO: 2194 - protein, 138 aa, Homo sapiens
QDPYVKEAENLKKYFNAGHSDVADNGTLFLGILKNWKEESDRKIMQSQIVSFYFKLFKNFKDDQSIQKSVETIKEDMNVKFFNSNKKKRDDFEKLTNYSVTDLNVQRKAIHELIQVMAELSPAAKTGKRKRSQMLFRG

SEQ ID NO: 2195 - protein, 250 aa, synthetic construct
QVQLVQSGAEVKKPGASVKVSCKASGYTFTNYYMHWVRQAPGLCLEWMGIINPSDGSTSYAQKFQGRVTMTRDTSTNTVYMDLSSLRSEDTAVYYCARGGNSAFYSYYDMDVWGQGTTVTVSSGGGGSGGGGSGGGGSDVVMTQTPLSLPVTLGQPASISCRSSQSLVYRDANTYLSWFQQRPGQSPRRLIYKVSNWQSGVPDRFSGGGSGTDFTLKISRVEAEDVGVYYCMQGTHWPPTFGCGTKVEIK

SEQ ID NO: 2196 - protein, 250 aa, synthetic construct
QVQLVQSGAEVKKPGASVKVSCKASGYTFTNYYMHWVRQAPGLCLEWMGIINPSDGSTSYAQKFQGRVTMTRDTSTNTVYMDLSSLRSEDTAVYYCARGGNSAFYSYYDMDVWGQGTTVTVSSGGGGSGGGGSGGGGSDVVMTQTPLSLPVTLGQPASISCRSSQSLVYRDGQTYLSWFQQRPGQSPRRLIYKVSNWQSGVPDRFSGGGSGTDFTLKISRVEAEDVGVYYCMQGTHWPPTFGCGTKVEIK

SEQ ID NO: 2197 - protein, 250 aa, synthetic construct
QVQLVQSGAEVKKPGASVKVSCKASGYTFTNYYMHWVRQAPGLCLEWMGIINPSDGSTSYAQKFQGRVTMTRDTSTNTVYMDLSSLRSEDTAVYYCARGGNSAFYSYYDMDVWGQGTTVTVSSGGGGSGGGGSGGGGSDVVMTQTPLSLPVTLGQPASISCRSSQSLVYRDGNAYLSWFQQRPGQSPRRLIYKVSNWQSGVPDRFSGGGSGTDFTLKISRVEAEDVGVYYCMQGTHWPPTFGCGTKVEIK

SEQ ID NO: 2198 - protein, 250 aa, synthetic construct
QVQLVQSGAEVKKPGASVKVSCKASGYTFTNYYMHWVRQAPGLCLEWMGIINPSDGSTSYAQKFQGRVTMTRDTSTNTVYMDLSSLRSEDTAVYYCARGGNSAFYSYYDMDVWGQGTTVTVSSGGGGSGGGGSGGGGSDVVMTQTPLSLPVTLGQPASISCRSSQSLVYRDGNTYLSWFQQRPGQSPRRLIYKVSNWQSGVPDRFSGSGSGTDFTLKISRVEAEDVGVYYCMQGTHWPPTFGCGTKVEIK

SEQ ID NO: 2199 - protein, 250 aa, synthetic construct
QVQLVQSGAEVKKPGASVKVSCKASGYTFTNYYMHWVRQAPGQCLEWMGIINPSDGSTSYAQKFQGRVTMTRDTSTNTVYMDLSSLRSEDTAVYYCARGGNSAFYSYYDMDVWGQGTTVTVSSGGGGSGGGGSGGGGSDVVMTQTPLSLPVTLGQPASISCRSSQSLVYRDGNTYLSWFQQRPGQSPRRLIYKVSNWQSGVPDRFSGGGSGTDFTLKISRVEAEDVGVYYCMQGTHWPPTFGCGTKVEIK

SEQ ID NO: 2200 - protein, 250 aa, synthetic construct
QVQLVQSGAEVKKPGASVKVSCKASGYTFTNYYMHWVRQAPGLCLEWMGIINPSEGSTSYAQKFQGRVTMTRDTSTNTVYMDLSSLRSEDTAVYYCARGGNSAFYSYYDMDVWGQGTTVTVSSGGGGSGGGGSGGGGSDVVMTQTPLSLPVTLGQPASISCRSSQSLVYRDGNTYLSWFQQRPGQSPRRLIYKVSNWQSGVPDRFSGGGSGTDFTLKISRVEAEDVGVYYCMQGTHWPPTFGCGTKVEIK

SEQ ID NO: 2201 - protein, 250 aa, synthetic construct
QVQLVQSGAEVKKPGASVKVSCKASGYTFTNYYMHWVRQAPGLCLEWMGIINPSDASTSYAQKFQGRVTMTRDTSTNTVYMDLSSLRSEDTAVYYCARGGNSAFYSYYDMDVWGQGTTVTVSSGGGGSGGGGSGGGGSDVVMTQTPLSLPVTLGQPASISCRSSQSLVYRDGNTYLSWFQQRPGQSPRRLIYKVSNWQSGVPDRFSGGGSGTDFTLKISRVEAEDVGVYYCMQGTHWPPTFGCGTKVEIK

SEQ ID NO: 2202 - protein, 250 aa, synthetic construct
QVQLVQSGAEVKKPGASVKVSCKASGYTFTNYYMHWVRQAPGQCLEWMGIINPSDGSTSYAQKFQGRVTMTRDTSTNTVYMDLSSLRSEDTAVYYCARGGNSAFYSYYDMDVWGQGTTVTVSSGGGGSGGGGSGGGGSDVVMTQTPLSLPVTLGQPASISCRSSQSLVYRDGNTYLSWFQQRPGQSPRRLIYKVSNWQSGVPDRFSGSGSGTDFTLKISRVEAEDVGVYYCMQGTHWPPTFGCGTKVEIK

SEQ ID NO: 2203 - protein, 250 aa, synthetic construct
QVQLVQSGAEVKKPGASVKVSCKASGYTFTNYYMHWVRQAPGQCLEWMGIINPSEGSTSYAQKFQGRVTMTRDTSTNTVYMDLSSLRSEDTAVYYCARGGNSAFYSYYDMDVWGQGTTVTVSSGGGGSGGGGSGGGGSDVVMTQTPLSLPVTLGQPASISCRSSQSLVYREGNTYLSWFQQRPGQSPRRLIYKVSNWQSGVPDRFSGSGSGTDFTLKISRVEAEDVGVYYCMQGTHWPPTFGCGTKVEIK

SEQ ID NO: 2204 - protein, 250 aa, synthetic construct
QVQLVQSGAEVKKPGASVKVSCKASGYTFTNYYMHWVRQAPGQCLEWMGIINPSDASTSYAQKFQGRVTMTRDTSTNTVYMDLSSLRSEDTAVYYCARGGNSAFYSYYDMDVWGQGTTVTVSSGGGGSGGGGSGGGGSDVVMTQTPLSLPVTLGQPASISCRSSQSLVYRDANTYLSWFQQRPGQSPRRLIYKVSNWQSGVPDRFSGSGSGTDFTLKISRVEAEDVGVYYCMQGTHWPPTFGCGTKVEIK

SEQ ID NO: 2205 - protein, 118 aa, synthetic construct
QVQLQESGPGLVKPSETLSLTCTVSGASISSFYWSWIRQPPGKCLEWIGYIYYSGTTNYNPSLKSRVTISVDTSKNQFSLKLSSVTAADTAVYYCARIAVAGFFFDYWGQGTLVTVSS

SEQ ID NO: 2206 - protein, 108 aa, synthetic construct
EIVLTQSPGTLSLSPGERATLSCRASQSVNKNYLAWYQQKPGQAPRLLIYGASSRATGIPDRFSGSGSGTDFTLTISRLEPEDFAVYYCQQYDRSPLTFGCGTKVEIK

SEQ ID NO: 2207 - protein, 241 aa, synthetic construct
QVQLQESGPGLVKPSETLSLTCTVSGASISSFYWSWIRQPPGKCLEWIGYIYYSGTTNYNPSLKSRVTISVDTSKNQFSLKLSSVTAADTAVYYCARIAVAGFFFDYWGQGTLVTVSSGGGGSGGGGSGGGGSEIVLTQSPGTLSLSPGERATLSCRASQSVNKNYLAWYQQKPGQAPRLLIYGASSRATGIPDRFSGSGSGTDFTLTISRLEPEDFAVYYCQQYDRSPLTFGCGTKVEIK

SEQ ID NO: 2208 - protein, 7 aa, synthetic construct
GGSISSY

SEQ ID NO: 2209 - protein, 8 aa, synthetic construct
GGSISSYY

SEQ ID NO: 2210 - protein, 5 aa, synthetic construct
YYSGT

SEQ ID NO: 2211 - protein, 7 aa, synthetic construct
VYYSGTT

SEQ ID NO: 2212 - protein, 10 aa, synthetic construct
IAVTGFYFDY

SEQ ID NO: 2213 - protein, 12 aa, synthetic construct
ASIAVTGFYFDY

SEQ ID NO: 2214 - protein, 499 aa, synthetic construct
QVQLVESGGGVVQSGRSLRLSCAASGFTFSDYGIHWVRQAPGKGLEWVAVISYHGSNKYYARSVKGRFTVSRDNSKNTLYLQMNSLRAEDTAVYYCAREIPFGMDVWGQGTTVTVSSGGGGSGGGGSGGGGSDIVMTQTPLSLPVTPGEPASISCRSSQSLLHSDGYNYLDWYLQKPGQSPQLLIYLGSNRASGVPDRFSGSGSGTDFTLTISRVEAEDVGVYYCMQALQTPLTFGGGTKVDIKSGGGGSEVQLVESGGGLVQPGGSLKLSCAASGFTFNKYAMNWVRQAPGKGLEWVARIRSKYNNYATYYADSVKDRFTISRDDSKNTAYLQMNNLKTEDTAVYYCVRHGNFGNSYISYWAYWGQGTLVTVSSGGGGSGGGGSGGGGSQTVVTQEPSLTVSPGGTVTLTCGSSTGAVTSGNYPNWVQQKPGQAPRGLIGGTKFLAPGTPARFSGSLLGGKAALTLSGVQPEDEAEYYCVLWYSNRWVFGGGTKLTVL

SEQ ID NO: 2215 - protein, 498 aa, synthetic construct
QVQLVQSGAEVKKPGASVKVSCKASGYTFTGYYMHWVRQAPGQGLEWMGWINPNSGDTNYAQKFQGRVTMTRDTSISTAYMELSRLTSDDTAVYYCARDANIAALDAFEIWGQGTMVTVSSGGGGSGGGGSGGGGSDIQMTQSPSSLSASVGDRVTITCRASQSISSYLNWYQQKPGKAPKLLIYAASSLQSGVPSRFSGSGSGTDFTLTISSLQPEDFATYYCQQSYSTPLTFGGGTKVEIKSGGGGSEVQLVESGGGLVQPGGSLKLSCAASGFTFNKYAMNWVRQAPGKGLEWVARIRSKYNNYATYYADSVKDRFTISRDDSKNTAYLQMNNLKTEDTAVYYCVRHGNFGNSYISYWAYWGQGTLVTVSSGGGGSGGGGSGGGGSQTVVTQEPSLTVSPGGTVTLTCGSSTGAVTSGNYPNWVQQKPGQAPRGLIGGTKFLAPGTPARFSGSLLGGKAALTLSGVQPEDEAEYYCVLWYSNRWVFGGGTKLTVL

SEQ ID NO: 2216 - protein, 501 aa, synthetic construct
QVQLVESGGGVVQPGRSLRLSCAASGFTFSSYGMHWVRQAPGKGLEWVAVISYHGRDTYYARSVKGRFTISRDNSKNTLYLHMNSLRAEDTAVYYCARDGATVTSYYYSGMDVWGQGTTVTVSSGGGGSGGGGSGGGGSDIQMTQSPSSLSASVGDRVTITCRASQGISNYLAWFQQKPGKAPKSLIYLASSLQSGVPSKFSGSGSGTDFTLTISSLQPEDFATYYCQQYNFYPFTFGPGTKVDIKSGGGGSEVQLVESGGGLVQPGGSLKLSCAASGFTFNKYAMNWVRQAPGKGLEWVARIRSKYNNYATYYADSVKDRFTISRDDSKNTAYLQMNNLKTEDTAVYYCVRHGNFGNSYISYWAYWGQGTLVTVSSGGGGSGGGGSGGGGSQTVVTQEPSLTVSPGGTVTLTCGSSTGAVTSGNYPNWVQQKPGQAPRGLIGGTKFLAPGTPARFSGSLLGGKAALTLSGVQPEDEAEYYCVLWYSNRWVFGGGTKLTVL

SEQ ID NO: 2217 - protein, 496 aa, synthetic construct
QVQLQESGPGLVKPSETLSLTCTVSGGSISSYYWSWIRQPPGKGLEWIGYVYYSGTTNYNPSLKSRVTISVDTSKNQFSLKLSSVTAADTAVYYCASIAVTGFYFDYWGQGTLVTVSSGGGGSGGGGSGGGGSEIVLTQSPGTLSLSPGERVTLSCRASQRVNNNYLAWYQQRPGQAPRLLIYGASSRATGIPDRFSGSGSGTDFTLTISRLEPEDFAVYYCQQYDRSPLTFGGGTKLEIKSGGGGSEVQLVESGGGLVQPGGSLKLSCAASGFTFNKYAMNWVRQAPGKGLEWVARIRSKYNNYATYYADSVKDRFTISRDDSKNTAYLQMNNLKTEDTAVYYCVRHGNFGNSYISYWAYWGQGTLVTVSSGGGGSGGGGSGGGGSQTVVTQEPSLTVSPGGTVTLTCGSSTGAVTSGNYPNWVQQKPGQAPRGLIGGTKFLAPGTPARFSGSLLGGKAALTLSGVQPEDEAEYYCVLWYSNRWVFGGGTKLTVL

SEQ ID NO: 2218 - protein, 496 aa, synthetic construct
QVQLQESGPGLVKPSETLSLTCTVSGGSISSYYWSWIRQPPGKGLEWIGYIYYSGRTNYYPSLKSRVTISIDTSKNQFSLKLSSVTAADTAVYYCARIAVAGFFFDYWGQGTLVTVSSGGGGSGGGGSGGGGSEIVLTQSPGTLSLSPGERATLSCRASQSVNKNYLAWYQQKPGQAPRLLIYGASSRATGIPDRFSGSGSGTDFTLTISRLEPEDFAVYYCQQYDRSPLTFGGGTKLEIKSGGGGSEVQLVESGGGLVQPGGSLKLSCAASGFTFNKYAMNWVRQAPGKGLEWVARIRSKYNNYATYYADSVKDRFTISRDDSKNTAYLQMNNLKTEDTAVYYCVRHGNFGNSYISYWAYWGQGTLVTVSSGGGGSGGGGSGGGGSQTVVTQEPSLTVSPGGTVTLTCGSSTGAVTSGNYPNWVQQKPGQAPRGLIGGTKFLAPGTPARFSGSLLGGKAALTLSGVQPEDEAEYYCVLWYSNRWVFGGGTKLTVL

SEQ ID NO: 2219 - protein, 496 aa, synthetic construct
QVQLQESGPGLVKPSETLSLTCTVSGASISSFYWSWIRQPPGKGLEWIGYIYYSGTTNYNPSLKSRVTISVDTSKNQFSLKLSSVTAADTAVYYCARIAVAGFFFDYWGQGTLVTVSSGGGGSGGGGSGGGGSEIVLTQSPGTLSLSPGERATLSCRASQSVNKNYLAWYQQKPGQAPRLLIYGASSRATGIPDRFSGSGSGTDFTLTISRLEPEDFAVYYCQQYDRSPLTFGGGTKVEIKSGGGGSEVQLVESGGGLVQPGGSLKLSCAASGFTFNKYAMNWVRQAPGKGLEWVARIRSKYNNYATYYADSVKDRFTISRDDSKNTAYLQMNNLKTEDTAVYYCVRHGNFGNSYISYWAYWGQGTLVTVSSGGGGSGGGGSGGGGSQTVVTQEPSLTVSPGGTVTLTCGSSTGAVTSGNYPNWVQQKPGQAPRGLIGGTKFLAPGTPARFSGSLLGGKAALTLSGVQPEDEAEYYCVLWYSNRWVFGGGTKLTVL

SEQ ID NO: 2220 - protein, 496 aa, synthetic construct
QVQLQESGPGLVKPSQTLSLTCTVSGASISSFYWSWIRQPPGKGLEWIGYIYYSGTTNYNPSLKSRVTISVDTSKNQFSLKLSSVTAADTAVYYCARIAVAGFFFDYWGQGTLVTVSSGGGGSGGGGSGGGGSEIVLTQSPGTLSLSPGERATLSCRASQSVNKNYLAWYQQKPGQAPRLLIYGASSRATGIPDRFSGSGSGTDFTLTISRLEPEDFAVYYCQQYDRSPLTFGGGTKVEIKSGGGGSEVQLVESGGGLVQPGGSLKLSCAASGFTFNKYAMNWVRQAPGKGLEWVARIRSKYNNYATYYADSVKDRFTISRDDSKNTAYLQMNNLKTEDTAVYYCVRHGNFGNSYISYWAYWGQGTLVTVSSGGGGSGGGGSGGGGSQTVVTQEPSLTVSPGGTVTLTCGSSTGAVTSGNYPNWVQQKPGQAPRGLIGGTKFLAPGTPARFSGSLLGGKAALTLSGVQPEDEAEYYCVLWYSNRWVFGGGTKLTVL

SEQ ID NO: 2221 - protein, 496 aa, synthetic construct
QVQLQEWGPGLVKPSETLSLTCTVSGASISSFYWSWIRQPPGKGLEWIGYIYYSGTTNYNPSLKSRVTISVDTSKNQLSLKLSSVTAADTAVYYCARIAVAGFFFDYWGQGTLVTVSSGGGGSGGGGSGGGGSEIVLTQSPGTLSLSPGERATLSCRASQSVNKNYLAWYQQKPGQAPRLLIYGASSRATGIPDRFSGSGSGTDFTLTISRLEPEDFAVYYCQQYDRSPLTFGGGTKVDIKSGGGGSEVQLVESGGGLVQPGGSLKLSCAASGFTFNKYAMNWVRQAPGKGLEWVARIRSKYNNYATYYADSVKDRFTISRDDSKNTAYLQMNNLKTEDTAVYYCVRHGNFGNSYISYWAYWGQGTLVTVSSGGGGSGGGGSGGGGSQTVVTQEPSLTVSPGGTVTLTCGSSTGAVTSGNYPNWVQQKPGQAPRGLIGGTKFLAPGTPARFSGSLLGGKAALTLSGVQPEDEAEYYCVLWYSNRWVFGGGTKLTVL

SEQ ID NO: 2222 - protein, 496 aa, synthetic construct
QVQLQESGPGLVKPSETLSLTCTVSGASISSFYWSWIRQPPGKGLEWIGYIYYSGTTNYNPSLKSRVTISVDTSKNQFSLKLSSVTAADTAVYYCARIAVAGFFFDYWGQGTLVTVSSGGGGSGGGGSGGGGSEIVLTQSPGTLSLSPGESATLSCRASQSVNKNYLAWYQQKPGQAPRLLIYGASSRATGIPDRFSGSGSGTDFTLTISRLEPEDFAVYYCQQYDRSPLTFGGGTRLEIKSGGGGSEVQLVESGGGLVQPGGSLKLSCAASGFTFNKYAMNWVRQAPGKGLEWVARIRSKYNNYATYYADSVKDRFTISRDDSKNTAYLQMNNLKTEDTAVYYCVRHGNFGNSYISYWAYWGQGTLVTVSSGGGGSGGGGSGGGGSQTVVTQEPSLTVSPGGTVTLTCGSSTGAVTSGNYPNWVQQKPGQAPRGLIGGTKFLAPGTPARFSGSLLGGKAALTLSGVQPEDEAEYYCVLWYSNRWVFGGGTKLTVL

SEQ ID NO: 2223 - protein, 496 aa, synthetic construct
QVQLQESGPGLVKPSQTLSLTCTVSGGSISSYYWSWIRQPPGKGLEWIGYIFYNGITNYNPSLKSRVTISLDTSKNQFSLKLSSVTAADTAKYYCARIHSGSFSFDYWDQGTLVTVSSGGGGSGGGGSGGGGSEIVMTQSPGTLSLSPGERATLSCRASQSVSRGYLAWYQQKPGQAPRLLIYGASSRATDIPDRFSGSGSGTDFTLTISRLEPEDFAVYYCQQYDTSPITFGQGTKVEIKSGGGGSEVQLVESGGGLVQPGGSLKLSCAASGFTFNKYAMNWVRQAPGKGLEWVARIRSKYNNYATYYADSVKDRFTISRDDSKNTAYLQMNNLKTEDTAVYYCVRHGNFGNSYISYWAYWGQGTLVTVSSGGGGSGGGGSGGGGSQTVVTQEPSLTVSPGGTVTLTCGSSTGAVTSGNYPNWVQQKPGQAPRGLIGGTKFLAPGTPARFSGSLLGGKAALTLSGVQPEDEAEYYCVLWYSNRWVFGGGTKLTVL

SEQ ID NO: 2224 - protein, 503 aa, synthetic construct
EVQLVESGGGLVKPGGSLRLSCAASGFIFNNAGMSWVRQAPGKGLEWVGRIKNKIDGGTTDFAAPVKGRFTISRDDSKNTLYLQMNSLKAEDTAVYYCTARGWYGDYFDYWGQGTLVTVSSGGGGSGGGGSGGGGSDIVMTQTPLSLPVTPGEPASISCRSSQSLLHSNGYNYLDWYLQKPGQSPQLLIYLGSNRASGVPDRFSGSGSGTDFTLKISRVEAEDVGIYYCMQALQTPFTFGPGTKVEIKSGGGGSEVQLVESGGGLVQPGGSLKLSCAASGFTFNKYAMNWVRQAPGKGLEWVARIRSKYNNYATYYADSVKDRFTISRDDSKNTAYLQMNNLKTEDTAVYYCVRHGNFGNSYISYWAYWGQGTLVTVSSGGGGSGGGGSGGGGSQTVVTQEPSLTVSPGGTVTLTCGSSTGAVTSGNYPNWVQQKPGQAPRGLIGGTKFLAPGTPARFSGSLLGGKAALTLSGVQPEDEAEYYCVLWYSNRWVFGGGTKLTVL

SEQ ID NO: 2225 - protein, 504 aa, synthetic construct
QVQLVESGGGVVQPGRSLRLSCAASGFSFSSYDIHWVRQAPGKGLEWVAVISSHGSNKNYARSVKGRFTISRDNSKNTLYLQMNSLKAEDTAVYYCARDGYSGNDPFYYYYHGMDVWGQGTTVTVSSGGGGSGGGGSGGGGSDIQMTQSPSSLSASVGDRVTITCRASQSISSYLNWYQQKPGKAPKLLIYAASSLQSGVPSRFSGSGSGTDFSLTISSLQPEDFATYYCQQSFTTPLTFGGGTKVEIKSGGGGSEVQLVESGGGLVQPGGSLKLSCAASGFTFNKYAMNWVRQAPGKGLEWVARIRSKYNNYATYYADSVKDRFTISRDDSKNTAYLQMNNLKTEDTAVYYCVRHGNFGNSYISYWAYWGQGTLVTVSSGGGGSGGGGSGGGGSQTVVTQEPSLTVSPGGTVTLTCGSSTGAVTSGNYPNWVQQKPGQAPRGLIGGTKFLAPGTPARFSGSLLGGKAALTLSGVQPEDEAEYYCVLWYSNRWVFGGGTKLTVL

SEQ ID NO: 2226 - protein, 505 aa, synthetic construct
QVQLVQSGAEVKKPGASVKVSCKASGYTFTSYYMHWVRQAPGQGLEWMGIINPSDGSTNYAQNFQGRVTMTRDTSTNTVYMELSSLRSEDTAVYYCARGGNSAFYSYYDMDVWGQGTTVTVSSGGGGSGGGGSGGGGSDVVMTQSPLSLPVTLGQPASISCRSSQSLVYRDGNTYLSWFQQRPGQSPRRLIYKVSNWQSGVPDRFSGSGSGTDFTLKISRVEAEDVGVYFCMQGTHWPPTFGQGTKVEIKSGGGGSEVQLVESGGGLVQPGGSLKLSCAASGFTFNKYAMNWVRQAPGKGLEWVARIRSKYNNYATYYADSVKDRFTISRDDSKNTAYLQMNNLKTEDTAVYYCVRHGNFGNSYISYWAYWGQGTLVTVSSGGGGSGGGGSGGGGSQTVVTQEPSLTVSPGGTVTLTCGSSTGAVTSGNYPNWVQQKPGQAPRGLIGGTKFLAPGTPARFSGSLLGGKAALTLSGVQPEDEAEYYCVLWYSNRWVFGGGTKLTVL

SEQ ID NO: 2227 - protein, 505 aa, synthetic construct
QVQLVQSGAEVKKPGASVKVSCKASGYTFTNYYMHWVRQAPGLGLEWMGIINPSDGSTSYAQKFQGRVTMTRDTSTNTVYMDLSSLRSEDTAVYYCARGGNSAFYSYYDMDVWGQGTTVTVSSGGGGSGGGGSGGGGSDVVMTQTPLSLPVTLGQPASISCRSSQSLVYRDGNTYLSWFQQRPGQSPRRLIYKVSNWQSGVPDRFSGGGSGTDFTLKISRVEAEDVGVYYCMQGTHWPPTFGQGTKVEIKSGGGGSEVQLVESGGGLVQPGGSLKLSCAASGFTFNKYAMNWVRQAPGKGLEWVARIRSKYNNYATYYADSVKDRFTISRDDSKNTAYLQMNNLKTEDTAVYYCVRHGNFGNSYISYWAYWGQGTLVTVSSGGGGSGGGGSGGGGSQTVVTQEPSLTVSPGGTVTLTCGSSTGAVTSGNYPNWVQQKPGQAPRGLIGGTKFLAPGTPARFSGSLLGGKAALTLSGVQPEDEAEYYCVLWYSNRWVFGGGTKLTVL

SEQ ID NO: 2228 - protein, 505 aa, synthetic construct
QVQLVQSGAEVKKPGASVKVSCKASGYTFTGYYIHWVRQAPGQGLEWMGIINPSDGSTSYGQNFQGRVTMTRDTSTNTVYMELSSLRSEDTAVYYCARGGNSAFYSYYDMDVWGQGTTVTVSSGGGGSGGGGSGGGGSDVVMTQSPLSLPVTLGQPASISCRSSQSLAYRDGNTYLSWFQQRPGQSPRRLIYKVSNWQSGVPDRFSGSGSGTDFTLKISRVEAEDVGVYFCMQGTHWPPTFGQGTKVEIKSGGGGSEVQLVESGGGLVQPGGSLKLSCAASGFTFNKYAMNWVRQAPGKGLEWVARIRSKYNNYATYYADSVKDRFTISRDDSKNTAYLQMNNLKTEDTAVYYCVRHGNFGNSYISYWAYWGQGTLVTVSSGGGGSGGGGSGGGGSQTVVTQEPSLTVSPGGTVTLTCGSSTGAVTSGNYPNWVQQKPGQAPRGLIGGTKFLAPGTPARFSGSLLGGKAALTLSGVQPEDEAEYYCVLWYSNRWVFGGGTKLTVL

SEQ ID NO: 2229 - protein, 505 aa, synthetic construct
QVQLVQSGAEVKKPGASVKVSCKASGYTFTGHYMHWVRQAPGQGLEWMGIINPSDGSTNYAQKFQGRVTMTRDTSTSTVYMELRSLRSEDTAVYYCTRGTTVVHYSYYDMDVWGQGTTVTVSSGGGGSGGGGSGGGGSDVVMTQTPLSLPVTLGQPASISCRSSQSLVYRDGNTYLTWFQQRPGQSPRRLIYKVSNWQSGVPDRFSGSGSGTDFTLKISRVEAEDVGVYYCMQGTHWPPTFGGGTKVEIKSGGGGSEVQLVESGGGLVQPGGSLKLSCAASGFTFNKYAMNWVRQAPGKGLEWVARIRSKYNNYATYYADSVKDRFTISRDDSKNTAYLQMNNLKTEDTAVYYCVRHGNFGNSYISYWAYWGQGTLVTVSSGGGGSGGGGSGGGGSQTVVTQEPSLTVSPGGTVTLTCGSSTGAVTSGNYPNWVQQKPGQAPRGLIGGTKFLAPGTPARFSGSLLGGKAALTLSGVQPEDEAEYYCVLWYSNRWVFGGGTKLTVL

SEQ ID NO: 2230 - protein, 505 aa, synthetic construct
QVQLVQSGAEVKKPGASVKVSCKASGYTFTNYFMHWVRQAPGLGLEWMGIINPSDGSTSYAQNFQGRVTMTRDTSTNTVYMELSSLRSEDTAVYYCARGGNSAFYSYYDMDVWGQGTTVTVSSGGGGSGGGGSGGGGSDVVMTQSPLSLPVTLGQPASISCRSSQSLVYRDGNTYLSWFQQRPGQSPRRLIYRVSNWQSGVPDRFSGSGSGTDFTLKISRVEAEDVGVYFCMQGTYWPPTFGQGTKVDIKSGGGGSEVQLVESGGGLVQPGGSLKLSCAASGFTFNKYAMNWVRQAPGKGLEWVARIRSKYNNYATYYADSVKDRFTISRDDSKNTAYLQMNNLKTEDTAVYYCVRHGNFGNSYISYWAYWGQGTLVTVSSGGGGSGGGGSGGGGSQTVVTQEPSLTVSPGGTVTLTCGSSTGAVTSGNYPNWVQQKPGQAPRGLIGGTKFLAPGTPARFSGSLLGGKAALTLSGVQPEDEAEYYCVLWYSNRWVFGGGTKLTVL

SEQ ID NO: 2231 - protein, 500 aa, synthetic construct
QVQLVESGGGAVQPGRSLRLSCAASGFTFSNYGMHWVRQAPGKGLEWVAVISHHGSSKYYARSVKGRFTISRDNSKNTLYLEMNSLRAEDTAVYYCARDWWELVFDYWGQGTLVTVSSGGGGSGGGGSGGGGSDIVMTQTPLSLSVTPGQPASISCKSSQSLLHSDGKTFLYWYLQKPGQPPQLLIYEVSNRFSGVPDRFSGSGSGTDFTLKISRVEAEDVGVYYCLQGIHLPFTFGPGTKVEIKSGGGGSEVQLVESGGGLVQPGGSLKLSCAASGFTFNKYAMNWVRQAPGKGLEWVARIRSKYNNYATYYADSVKDRFTISRDDSKNTAYLQMNNLKTEDTAVYYCVRHGNFGNSYISYWAYWGQGTLVTVSSGGGGSGGGGSGGGGSQTVVTQEPSLTVSPGGTVTLTCGSSTGAVTSGNYPNWVQQKPGQAPRGLIGGTKFLAPGTPARFSGSLLGGKAALTLSGVQPEDEAEYYCVLWYSNRWVFGGGTKLTVL

SEQ ID NO: 2232 - protein, 502 aa, synthetic construct
QVTLKESGPMLVKPTETLTLTCTVSGFSLSNSRMGVSWIRQPPGRALEWLAHIFSNDGKSYSTSLKSRLTISKDTSKSQVVLTMTNMDPVDTATYYCARYNYDSSGYYYSFFDYWGQGTLVTVSSGGGGSGGGGSGGGGSDIQMTQSPSSLSASVGDRVTITCRASQSISSYLNWYQQKPGKAPKLLIYAASSLQSGVPSRFSGSGSGTDFTLTISSLQPEDFATYYCQQGYSSPFTFGGGTKVEIKSGGGGSEVQLVESGGGLVQPGGSLKLSCAASGFTFNKYAMNWVRQAPGKGLEWVARIRSKYNNYATYYADSVKDRFTISRDDSKNTAYLQMNNLKTEDTAVYYCVRHGNFGNSYISYWAYWGQGTLVTVSSGGGGSGGGGSGGGGSQTVVTQEPSLTVSPGGTVTLTCGSSTGAVTSGNYPNWVQQKPGQAPRGLIGGTKFLAPGTPARFSGSLLGGKAALTLSGVQPEDEAEYYCVLWYSNRWVFGGGTKLTVL

SEQ ID NO: 2233 - protein, 502 aa, synthetic construct
QVTLKESGPVLVKPTETLTLTCTVSGFSLSNARMGVSWLRQPPGKALEWLAHIFSTDEKSYSTSLKSRLTISKDTSKSQVVLTMTNMDPVDTATYYCARYYYDSSGYYYSFFDYWGQGTLVTVSSGGGGSGGGGSGGGGSDIQMTQSPSSLSASVGDRVTITCRASQSIRSYLNWYQQKPGKAPKLLIYGASNLQSGVPSRFSGSGSGTDFTLTISSLQPEDFATYYCQQSYSSPFTFGGGTKVEIKSGGGGSEVQLVESGGGLVQPGGSLKLSCAASGFTFNKYAMNWVRQAPGKGLEWVARIRSKYNNYATYYADSVKDRFTISRDDSKNTAYLQMNNLKTEDTAVYYCVRHGNFGNSYISYWAYWGQGTLVTVSSGGGGSGGGGSGGGGSQTVVTQEPSLTVSPGGTVTLTCGSSTGAVTSGNYPNWVQQKPGQAPRGLIGGTKFLAPGTPARFSGSLLGGKAALTLSGVQPEDEAEYYCVLWYSNRWVFGGGTKLTVL

SEQ ID NO: 2234 - protein, 498 aa, synthetic construct
QVQLVQSGAEVKKPGASVKVSCKASGYAFTSYYIHWVRQAPGQGLEWMGIINPSGGSKSYAQKFRGRVTMTRDTSTSTVYMELSSLTSEDTAVYYCARSMSTVTSDAFDIWGQGTMVTVSSGGGGSGGGGSGGGGSDIQMTQSPSSLSASVGDRVTITCRASQSISNYLNWYQQKPGKAPKLLIYAASSLQSGVPSRFSGSGSGTEFTLTISSLQPEDFATYYCQQSYSAPLTFGGGTKVDIKSGGGGSEVQLVESGGGLVQPGGSLKLSCAASGFTFNKYAMNWVRQAPGKGLEWVARIRSKYNNYATYYADSVKDRFTISRDDSKNTAYLQMNNLKTEDTAVYYCVRHGNFGNSYISYWAYWGQGTLVTVSSGGGGSGGGGSGGGGSQTVVTQEPSLTVSPGGTVTLTCGSSTGAVTSGNYPNWVQQKPGQAPRGLIGGTKFLAPGTPARFSGSLLGGKAALTLSGVQPEDEAEYYCVLWYSNRWVFGGGTKLTVL

SEQ ID NO: 2235 - protein, 496 aa, synthetic construct
QVQLQESGPGLVKPSETLSLTCTVSGGSISSYYWSWIRQPPGKGLEWIGYVYYSGTTNYNPSLKSRVTISVDTSKNQFSLKLSSVTAADTAVYYCASIAVTGFYFDYWGQGTLVTVSSGGGGSGGGGSGGGGSEIVLTQSPGTLSLSPGERVTLSCRASQRVNNNYLAWYQQRPGQAPRLLIYGASSRATGIPDRFSGSGSGTDFTLTISRLEPEDFAVYYCQQYDRSPLTFGGGTKLEIKSGGGGSEVQLVESGGGLVQPGGSLRLSCAASGFTFNSYAMNWVRQAPGKGLEWVARIRSKYNNYATYYADSVKGRFTISRDDSKNTAYLQMNSLKTEDTAVYYCVRHGNFGNSYVSWWAYWGQGTLVTVSSGGGGSGGGGSGGGGSQTVVTQEPSLTVSPGGTVTLTCGSSTGAVTSGNYPNWVQQKPGQAPRGLIGGTKFLAPGTPARFSGSLLGGKAALTLSGVQPEDEAEYYCVLWYSNRWVFGGGTKLTVL

SEQ ID NO: 2236 - protein, 496 aa, synthetic construct
QVQLQESGPGLVKPSETLSLTCTVSGGSISSYYWSWIRQPPGKGLEWIGYIYYSGRTNYYPSLKSRVTISIDTSKNQFSLKLSSVTAADTAVYYCARIAVAGFFFDYWGQGTLVTVSSGGGGSGGGGSGGGGSEIVLTQSPGTLSLSPGERATLSCRASQSVNKNYLAWYQQKPGQAPRLLIYGASSRATGIPDRFSGSGSGTDFTLTISRLEPEDFAVYYCQQYDRSPLTFGGGTKLEIKSGGGGSEVQLVESGGGLVQPGGSLRLSCAASGFTFNSYAMNWVRQAPGKGLEWVARIRSKYNNYATYYADSVKGRFTISRDDSKNTAYLQMNSLKTEDTAVYYCVRHGNFGNSYVSWWAYWGQGTLVTVSSGGGGSGGGGSGGGGSQTVVTQEPSLTVSPGGTVTLTCGSSTGAVTSGNYPNWVQQKPGQAPRGLIGGTKFLAPGTPARFSGSLLGGKAALTLSGVQPEDEAEYYCVLWYSNRWVFGGGTKLTVL

SEQ ID NO: 2237 - protein, 496 aa, synthetic construct
QVQLQESGPGLVKPSETLSLTCTVSGASISSFYWSWIRQPPGKGLEWIGYIYYSGTTNYNPSLKSRVTISVDTSKNQFSLKLSSVTAADTAVYYCARIAVAGFFFDYWGQGTLVTVSSGGGGSGGGGSGGGGSEIVLTQSPGTLSLSPGERATLSCRASQSVNKNYLAWYQQKPGQAPRLLIYGASSRATGIPDRFSGSGSGTDFTLTISRLEPEDFAVYYCQQYDRSPLTFGGGTKVEIKSGGGGSEVQLVESGGGLVQPGGSLRLSCAASGFTFNSYAMNWVRQAPGKGLEWVARIRSKYNNYATYYADSVKGRFTISRDDSKNTAYLQMNSLKTEDTAVYYCVRHGNFGNSYVSWWAYWGQGTLVTVSSGGGGSGGGGSGGGGSQTVVTQEPSLTVSPGGTVTLTCGSSTGAVTSGNYPNWVQQKPGQAPRGLIGGTKFLAPGTPARFSGSLLGGKAALTLSGVQPEDEAEYYCVLWYSNRWVFGGGTKLTVL

SEQ ID NO: 2238 - protein, 496 aa, synthetic construct
QVQLQESGPGLVKPSQTLSLTCTVSGASISSFYWSWIRQPPGKGLEWIGYIYYSGTTNYNPSLKSRVTISVDTSKNQFSLKLSSVTAADTAVYYCARIAVAGFFFDYWGQGTLVTVSSGGGGSGGGGSGGGGSEIVLTQSPGTLSLSPGERATLSCRASQSVNKNYLAWYQQKPGQAPRLLIYGASSRATGIPDRFSGSGSGTDFTLTISRLEPEDFAVYYCQQYDRSPLTFGGGTKVEIKSGGGGSEVQLVESGGGLVQPGGSLRLSCAASGFTFNSYAMNWVRQAPGKGLEWVARIRSKYNNYATYYADSVKGRFTISRDDSKNTAYLQMNSLKTEDTAVYYCVRHGNFGNSYVSWWAYWGQGTLVTVSSGGGGSGGGGSGGGGSQTVVTQEPSLTVSPGGTVTLTCGSSTGAVTSGNYPNWVQQKPGQAPRGLIGGTKFLAPGTPARFSGSLLGGKAALTLSGVQPEDEAEYYCVLWYSNRWVFGGGTKLTVL

SEQ ID NO: 2239 - protein, 496 aa, synthetic construct
QVQLQEWGPGLVKPSETLSLTCTVSGASISSFYWSWIRQPPGKGLEWIGYIYYSGTTNYNPSLKSRVTISVDTSKNQLSLKLSSVTAADTAVYYCARIAVAGFFFDYWGQGTLVTVSSGGGGSGGGGSGGGGSEIVLTQSPGTLSLSPGERATLSCRASQSVNKNYLAWYQQKPGQAPRLLIYGASSRATGIPDRFSGSGSGTDFTLTISRLEPEDFAVYYCQQYDRSPLTFGGGTKVDIKSGGGGSEVQLVESGGGLVQPGGSLRLSCAASGFTFNSYAMNWVRQAPGKGLEWVARIRSKYNNYATYYADSVKGRFTISRDDSKNTAYLQMNSLKTEDTAVYYCVRHGNFGNSYVSWWAYWGQGTLVTVSSGGGGSGGGGSGGGGSQTVVTQEPSLTVSPGGTVTLTCGSSTGAVTSGNYPNWVQQKPGQAPRGLIGGTKFLAPGTPARFSGSLLGGKAALTLSGVQPEDEAEYYCVLWYSNRWVFGGGTKLTVL

SEQ ID NO: 2240 - protein, 496 aa, synthetic construct
QVQLQESGPGLVKPSETLSLTCTVSGASISSFYWSWIRQPPGKGLEWIGYIYYSGTTNYNPSLKSRVTISVDTSKNQFSLKLSSVTAADTAVYYCARIAVAGFFFDYWGQGTLVTVSSGGGGSGGGGSGGGGSEIVLTQSPGTLSLSPGESATLSCRASQSVNKNYLAWYQQKPGQAPRLLIYGASSRATGIPDRFSGSGSGTDFTLTISRLEPEDFAVYYCQQYDRSPLTFGGGTRLEIKSGGGGSEVQLVESGGGLVQPGGSLRLSCAASGFTFNSYAMNWVRQAPGKGLEWVARIRSKYNNYATYYADSVKGRFTISRDDSKNTAYLQMNSLKTEDTAVYYCVRHGNFGNSYVSWWAYWGQGTLVTVSSGGGGSGGGGSGGGGSQTVVTQEPSLTVSPGGTVTLTCGSSTGAVTSGNYPNWVQQKPGQAPRGLIGGTKFLAPGTPARFSGSLLGGKAALTLSGVQPEDEAEYYCVLWYSNRWVFGGGTKLTVL

SEQ ID NO: 2241 - protein, 496 aa, synthetic construct
QVQLQESGPGLVKPSQTLSLTCTVSGGSISSYYWSWIRQPPGKGLEWIGYIFYNGITNYNPSLKSRVTISLDTSKNQFSLKLSSVTAADTAKYYCARIHSGSFSFDYWDQGTLVTVSSGGGGSGGGGSGGGGSEIVMTQSPGTLSLSPGERATLSCRASQSVSRGYLAWYQQKPGQAPRLLIYGASSRATDIPDRFSGSGSGTDFTLTISRLEPEDFAVYYCQQYDTSPITFGQGTKVEIKSGGGGSEVQLVESGGGLVQPGGSLRLSCAASGFTFNSYAMNWVRQAPGKGLEWVARIRSKYNNYATYYADSVKGRFTISRDDSKNTAYLQMNSLKTEDTAVYYCVRHGNFGNSYVSWWAYWGQGTLVTVSSGGGGSGGGGSGGGGSQTVVTQEPSLTVSPGGTVTLTCGSSTGAVTSGNYPNWVQQKPGQAPRGLIGGTKFLAPGTPARFSGSLLGGKAALTLSGVQPEDEAEYYCVLWYSNRWVFGGGTKLTVL

SEQ ID NO: 2242 - protein, 505 aa, synthetic construct
QVQLVQSGAEVKKPGASVKVSCKASGYTFTSYYMHWVRQAPGQGLEWMGIINPSDGSTNYAQNFQGRVTMTRDTSTNTVYMELSSLRSEDTAVYYCARGGNSAFYSYYDMDVWGQGTTVTVSSGGGGSGGGGSGGGGSDVVMTQSPLSLPVTLGQPASISCRSSQSLVYRDGNTYLSWFQQRPGQSPRRLIYKVSNWQSGVPDRFSGSGSGTDFTLKISRVEAEDVGVYFCMQGTHWPPTFGQGTKVEIKSGGGGSEVQLVESGGGLVQPGGSLRLSCAASGFTFNSYAMNWVRQAPGKGLEWVARIRSKYNNYATYYADSVKGRFTISRDDSKNTAYLQMNSLKTEDTAVYYCVRHGNFGNSYVSWWAYWGQGTLVTVSSGGGGSGGGGSGGGGSQTVVTQEPSLTVSPGGTVTLTCGSSTGAVTSGNYPNWVQQKPGQAPRGLIGGTKFLAPGTPARFSGSLLGGKAALTLSGVQPEDEAEYYCVLWYSNRWVFGGGTKLTVL

SEQ ID NO: 2243 - protein, 505 aa, synthetic construct
QVQLVQSGAEVKKPGASVKVSCKASGYTFTNYYMHWVRQAPGLGLEWMGIINPSDGSTSYAQKFQGRVTMTRDTSTNTVYMDLSSLRSEDTAVYYCARGGNSAFYSYYDMDVWGQGTTVTVSSGGGGSGGGGSGGGGSDVVMTQTPLSLPVTLGQPASISCRSSQSLVYRDGNTYLSWFQQRPGQSPRRLIYKVSNWQSGVPDRFSGGGSGTDFTLKISRVEAEDVGVYYCMQGTHWPPTFGQGTKVEIKSGGGGSEVQLVESGGGLVQPGGSLRLSCAASGFTFNSYAMNWVRQAPGKGLEWVARIRSKYNNYATYYADSVKGRFTISRDDSKNTAYLQMNSLKTEDTAVYYCVRHGNFGNSYVSWWAYWGQGTLVTVSSGGGGSGGGGSGGGGSQTVVTQEPSLTVSPGGTVTLTCGSSTGAVTSGNYPNWVQQKPGQAPRGLIGGTKFLAPGTPARFSGSLLGGKAALTLSGVQPEDEAEYYCVLWYSNRWVFGGGTKLTVL

SEQ ID NO: 2244 - protein, 505 aa, synthetic construct
QVQLVQSGAEVKKPGASVKVSCKASGYTFTGYYIHWVRQAPGQGLEWMGIINPSDGSTSYGQNFQGRVTMTRDTSTNTVYMELSSLRSEDTAVYYCARGGNSAFYSYYDMDVWGQGTTVTVSSGGGGSGGGGSGGGGSDVVMTQSPLSLPVTLGQPASISCRSSQSLAYRDGNTYLSWFQQRPGQSPRRLIYKVSNWQSGVPDRFSGSGSGTDFTLKISRVEAEDVGVYFCMQGTHWPPTFGQGTKVEIKSGGGGSEVQLVESGGGLVQPGGSLRLSCAASGFTFNSYAMNWVRQAPGKGLEWVARIRSKYNNYATYYADSVKGRFTISRDDSKNTAYLQMNSLKTEDTAVYYCVRHGNFGNSYVSWWAYWGQGTLVTVSSGGGGSGGGGSGGGGSQTVVTQEPSLTVSPGGTVTLTCGSSTGAVTSGNYPNWVQQKPGQAPRGLIGGTKFLAPGTPARFSGSLLGGKAALTLSGVQPEDEAEYYCVLWYSNRWVFGGGTKLTVL

SEQ ID NO: 2245 - protein, 1096 aa, synthetic construct
QVQLVESGGGVVQSGRSLRLSCAASGFTFSDYGIHWVRQAPGKGLEWVAVISYHGSNKYYARSVKGRFTVSRDNSKNTLYLQMNSLRAEDTAVYYCAREIPFGMDVWGQGTTVTVSSGGGGSGGGGSGGGGSDIVMTQTPLSLPVTPGEPASISCRSSQSLLHSDGYNYLDWYLQKPGQSPQLLIYLGSNRASGVPDRFSGSGSGTDFTLTISRVEAEDVGVYYCMQALQTPLTFGGGTKVDIKSGGGGSEVQLVESGGGLVQPGGSLKLSCAASGFTFNKYAMNWVRQAPGKGLEWVARIRSKYNNYATYYADSVKDRFTISRDDSKNTAYLQMNNLKTEDTAVYYCVRHGNFGNSYISYWAYWGQGTLVTVSSGGGGSGGGGSGGGGSQTVVTQEPSLTVSPGGTVTLTCGSSTGAVTSGNYPNWVQQKPGQAPRGLIGGTKFLAPGTPARFSGSLLGGKAALTLSGVQPEDEAEYYCVLWYSNRWVFGGGTKLTVLPGGGGSDAHKSEVAHRFKDLGEENFKALVLIAFAQYLQQCPFEDHVKLVNEVTEFAKTCVADESAENCDKSLHTLFGDKLCTVATLRETYGEMADCCAKQEPERNECFLQHKDDNPNLPRLVRPEVDVMCTAFHDNEETFLKKYLYEIARRHPYFYAPELLFFAKRYKAAFTECCQAADKAACLLPKLDELRDEGKASSAKQRLKCASLQKFGERAFKAWAVARLSQRFPKAEFAEVSKLVTDLTKVHTECCHGDLLECADDRADLAKYICENQDSISSKLKECCEKPLLEKSHCIAEVENDEMPADLPSLAADFVESKDVCKNYAEAKDVFLGMFLYEYARRHPDYSVVLLLRLAKTYETTLEKCCAAADPHECYAKVFDEFKPLVEEPQNLIKQNCELFEQLGEYKFQNALLVRYTKKVPQVSTPTLVEVSRNLGKVGSKCCKHPEAKRMPCAEDYLSVVLNQLCVLHEKTPVSDRVTKCCTESLVNRRPCFSALEVDETYVPKEFNAGTFTFHADICTLSEKERQIKKQTALVELVKHKPKATKEQLKAAMDDFAAFVEKCCKADDKETCFAEEGKKLVAASQAALGLHHHHHH

SEQ ID NO: 2246 - protein, 1095 aa, synthetic construct
QVQLVQSGAEVKKPGASVKVSCKASGYTFTGYYMHWVRQAPGQGLEWMGWINPNSGDTNYAQKFQGRVTMTRDTSISTAYMELSRLTSDDTAVYYCARDANIAALDAFEIWGQGTMVTVSSGGGGSGGGGSGGGGSDIQMTQSPSSLSASVGDRVTITCRASQSISSYLNWYQQKPGKAPKLLIYAASSLQSGVPSRFSGSGSGTDFTLTISSLQPEDFATYYCQQSYSTPLTFGGGTKVEIKSGGGGSEVQLVESGGGLVQPGGSLKLSCAASGFTFNKYAMNWVRQAPGKGLEWVARIRSKYNNYATYYADSVKDRFTISRDDSKNTAYLQMNNLKTEDTAVYYCVRHGNFGNSYISYWAYWGQGTLVTVSSGGGGSGGGGSGGGGSQTVVTQEPSLTVSPGGTVTLTCGSSTGAVTSGNYPNWVQQKPGQAPRGLIGGTKFLAPGTPARFSGSLLGGKAALTLSGVQPEDEAEYYCVLWYSNRWVFGGGTKLTVLPGGGGSDAHKSEVAHRFKDLGEENFKALVLIAFAQYLQQCPFEDHVKLVNEVTEFAKTCVADESAENCDKSLHTLFGDKLCTVATLRETYGEMADCCAKQEPERNECFLQHKDDNPNLPRLVRPEVDVMCTAFHDNEETFLKKYLYEIARRHPYFYAPELLFFAKRYKAAFTECCQAADKAACLLPKLDELRDEGKASSAKQRLKCASLQKFGERAFKAWAVARLSQRFPKAEFAEVSKLVTDLTKVHTECCHGDLLECADDRADLAKYICENQDSISSKLKECCEKPLLEKSHCIAEVENDEMPADLPSLAADFVESKDVCKNYAEAKDVFLGMFLYEYARRHPDYSVVLLLRLAKTYETTLEKCCAAADPHECYAKVFDEFKPLVEEPQNLIKQNCELFEQLGEYKFQNALLVRYTKKVPQVSTPTLVEVSRNLGKVGSKCCKHPEAKRMPCAEDYLSVVLNQLCVLHEKTPVSDRVTKCCTESLVNRRPCFSALEVDETYVPKEFNAGTFTFHADICTLSEKERQIKKQTALVELVKHKPKATKEQLKAAMDDFAAFVEKCCKADDKETCFAEEGKKLVAASQAALGLHHHHHH

SEQ ID NO: 2247 - protein, 1098 aa, synthetic construct
QVQLVESGGGVVQPGRSLRLSCAASGFTFSSYGMHWVRQAPGKGLEWVAVISYHGRDTYYARSVKGRFTISRDNSKNTLYLHMNSLRAEDTAVYYCARDGATVTSYYYSGMDVWGQGTTVTVSSGGGGSGGGGSGGGGSDIQMTQSPSSLSASVGDRVTITCRASQGISNYLAWFQQKPGKAPKSLIYLASSLQSGVPSKFSGSGSGTDFTLTISSLQPEDFATYYCQQYNFYPFTFGPGTKVDIKSGGGGSEVQLVESGGGLVQPGGSLKLSCAASGFTFNKYAMNWVRQAPGKGLEWVARIRSKYNNYATYYADSVKDRFTISRDDSKNTAYLQMNNLKTEDTAVYYCVRHGNFGNSYISYWAYWGQGTLVTVSSGGGGSGGGGSGGGGSQTVVTQEPSLTVSPGGTVTLTCGSSTGAVTSGNYPNWVQQKPGQAPRGLIGGTKFLAPGTPARFSGSLLGGKAALTLSGVQPEDEAEYYCVLWYSNRWVFGGGTKLTVLPGGGGSDAHKSEVAHRFKDLGEENFKALVLIAFAQYLQQCPFEDHVKLVNEVTEFAKTCVADESAENCDKSLHTLFGDKLCTVATLRETYGEMADCCAKQEPERNECFLQHKDDNPNLPRLVRPEVDVMCTAFHDNEETFLKKYLYEIARRHPYFYAPELLFFAKRYKAAFTECCQAADKAACLLPKLDELRDEGKASSAKQRLKCASLQKFGERAFKAWAVARLSQRFPKAEFAEVSKLVTDLTKVHTECCHGDLLECADDRADLAKYICENQDSISSKLKECCEKPLLEKSHCIAEVENDEMPADLPSLAADFVESKDVCKNYAEAKDVFLGMFLYEYARRHPDYSVVLLLRLAKTYETTLEKCCAAADPHECYAKVFDEFKPLVEEPQNLIKQNCELFEQLGEYKFQNALLVRYTKKVPQVSTPTLVEVSRNLGKVGSKCCKHPEAKRMPCAEDYLSVVLNQLCVLHEKTPVSDRVTKCCTESLVNRRPCFSALEVDETYVPKEFNAETFTFHADICTLSEKERQIKKQTALVELVKHKPKATKEQLKAVMDDFAAFVEKCCKADDKETCFAEEGKKLVAASQAALGLHHHHHH

SEQ ID NO: 2248 - protein, 1093 aa, synthetic construct
QVQLQESGPGLVKPSETLSLTCTVSGGSISSYYWSWIRQPPGKGLEWIGYVYYSGTTNYNPSLKSRVTISVDTSKNQFSLKLSSVTAADTAVYYCASIAVTGFYFDYWGQGTLVTVSSGGGGSGGGGSGGGGSEIVLTQSPGTLSLSPGERVTLSCRASQRVNNNYLAWYQQRPGQAPRLLIYGASSRATGIPDRFSGSGSGTDFTLTISRLEPEDFAVYYCQQYDRSPLTFGGGTKLEIKSGGGGSEVQLVESGGGLVQPGGSLKLSCAASGFTFNKYAMNWVRQAPGKGLEWVARIRSKYNNYATYYADSVKDRFTISRDDSKNTAYLQMNNLKTEDTAVYYCVRHGNFGNSYISYWAYWGQGTLVTVSSGGGGSGGGGSGGGGSQTVVTQEPSLTVSPGGTVTLTCGSSTGAVTSGNYPNWVQQKPGQAPRGLIGGTKFLAPGTPARFSGSLLGGKAALTLSGVQPEDEAEYYCVLWYSNRWVFGGGTKLTVLPGGGGSDAHKSEVAHRFKDLGEENFKALVLIAFAQYLQQCPFEDHVKLVNEVTEFAKTCVADESAENCDKSLHTLFGDKLCTVATLRETYGEMADCCAKQEPERNECFLQHKDDNPNLPRLVRPEVDVMCTAFHDNEETFLKKYLYEIARRHPYFYAPELLFFAKRYKAAFTECCQAADKAACLLPKLDELRDEGKASSAKQRLKCASLQKFGERAFKAWAVARLSQRFPKAEFAEVSKLVTDLTKVHTECCHGDLLECADDRADLAKYICENQDSISSKLKECCEKPLLEKSHCIAEVENDEMPADLPSLAADFVESKDVCKNYAEAKDVFLGMFLYEYARRHPDYSVVLLLRLAKTYETTLEKCCAAADPHECYAKVFDEFKPLVEEPQNLIKQNCELFEQLGEYKFQNALLVRYTKKVPQVSTPTLVEVSRNLGKVGSKCCKHPEAKRMPCAEDYLSVVLNQLCVLHEKTPVSDRVTKCCTESLVNRRPCFSALEVDETYVPKEFNAETFTFHADICTLSEKERQIKKQTALVELVKHKPKATKEQLKAVMDDFAAFVEKCCKADDKETCFAEEGKKLVAASQAALGLHHHHHH

SEQ ID NO: 2249 - protein, 1093 aa, synthetic construct
QVQLQESGPGLVKPSETLSLTCTVSGGSISSYYWSWIRQPPGKGLEWIGYIYYSGRTNYYPSLKSRVTISIDTSKNQFSLKLSSVTAADTAVYYCARIAVAGFFFDYWGQGTLVTVSSGGGGSGGGGSGGGGSEIVLTQSPGTLSLSPGERATLSCRASQSVNKNYLAWYQQKPGQAPRLLIYGASSRATGIPDRFSGSGSGTDFTLTISRLEPEDFAVYYCQQYDRSPLTFGGGTKLEIKSGGGGSEVQLVESGGGLVQPGGSLKLSCAASGFTFNKYAMNWVRQAPGKGLEWVARIRSKYNNYATYYADSVKDRFTISRDDSKNTAYLQMNNLKTEDTAVYYCVRHGNFGNSYISYWAYWGQGTLVTVSSGGGGSGGGGSGGGGSQTVVTQEPSLTVSPGGTVTLTCGSSTGAVTSGNYPNWVQQKPGQAPRGLIGGTKFLAPGTPARFSGSLLGGKAALTLSGVQPEDEAEYYCVLWYSNRWVFGGGTKLTVLPGGGGSDAHKSEVAHRFKDLGEENFKALVLIAFAQYLQQCPFEDHVKLVNEVTEFAKTCVADESAENCDKSLHTLFGDKLCTVATLRETYGEMADCCAKQEPERNECFLQHKDDNPNLPRLVRPEVDVMCTAFHDNEETFLKKYLYEIARRHPYFYAPELLFFAKRYKAAFTECCQAADKAACLLPKLDELRDEGKASSAKQRLKCASLQKFGERAFKAWAVARLSQRFPKAEFAEVSKLVTDLTKVHTECCHGDLLECADDRADLAKYICENQDSISSKLKECCEKPLLEKSHCIAEVENDEMPADLPSLAADFVESKDVCKNYAEAKDVFLGMFLYEYARRHPDYSVVLLLRLAKTYETTLEKCCAAADPHECYAKVFDEFKPLVEEPQNLIKQNCELFEQLGEYKFQNALLVRYTKKVPQVSTPTLVEVSRNLGKVGSKCCKHPEAKRMPCAEDYLSVVLNQLCVLHEKTPVSDRVTKCCTESLVNRRPCFSALEVDETYVPKEFNAETFTFHADICTLSEKERQIKKQTALVELVKHKPKATKEQLKAVMDDFAAFVEKCCKADDKETCFAEEGKKLVAASQAALGLHHHHHH

SEQ ID NO: 2250 - protein, 1093 aa, synthetic construct
QVQLQESGPGLVKPSETLSLTCTVSGASISSFYWSWIRQPPGKGLEWIGYIYYSGTTNYNPSLKSRVTISVDTSKNQFSLKLSSVTAADTAVYYCARIAVAGFFFDYWGQGTLVTVSSGGGGSGGGGSGGGGSEIVLTQSPGTLSLSPGERATLSCRASQSVNKNYLAWYQQKPGQAPRLLIYGASSRATGIPDRFSGSGSGTDFTLTISRLEPEDFAVYYCQQYDRSPLTFGGGTKVEIKSGGGGSEVQLVESGGGLVQPGGSLKLSCAASGFTFNKYAMNWVRQAPGKGLEWVARIRSKYNNYATYYADSVKDRFTISRDDSKNTAYLQMNNLKTEDTAVYYCVRHGNFGNSYISYWAYWGQGTLVTVSSGGGGSGGGGSGGGGSQTVVTQEPSLTVSPGGTVTLTCGSSTGAVTSGNYPNWVQQKPGQAPRGLIGGTKFLAPGTPARFSGSLLGGKAALTLSGVQPEDEAEYYCVLWYSNRWVFGGGTKLTVLPGGGGSDAHKSEVAHRFKDLGEENFKALVLIAFAQYLQQCPFEDHVKLVNEVTEFAKTCVADESAENCDKSLHTLFGDKLCTVATLRETYGEMADCCAKQEPERNECFLQHKDDNPNLPRLVRPEVDVMCTAFHDNEETFLKKYLYEIARRHPYFYAPELLFFAKRYKAAFTECCQAADKAACLLPKLDELRDEGKASSAKQRLKCASLQKFGERAFKAWAVARLSQRFPKAEFAEVSKLVTDLTKVHTECCHGDLLECADDRADLAKYICENQDSISSKLKECCEKPLLEKSHCIAEVENDEMPADLPSLAADFVESKDVCKNYAEAKDVFLGMFLYEYARRHPDYSVVLLLRLAKTYETTLEKCCAAADPHECYAKVFDEFKPLVEEPQNLIKQNCELFEQLGEYKFQNALLVRYTKKVPQVSTPTLVEVSRNLGKVGSKCCKHPEAKRMPCAEDYLSVVLNQLCVLHEKTPVSDRVTKCCTESLVNRRPCFSALEVDETYVPKEFNAETFTFHADICTLSEKERQIKKQTALVELVKHKPKATKEQLKAVMDDFAAFVEKCCKADDKETCFAEEGKKLVAASQAALGLHHHHHH

SEQ ID NO: 2251 - protein, 1093 aa, synthetic construct
QVQLQESGPGLVKPSQTLSLTCTVSGASISSFYWSWIRQPPGKGLEWIGYIYYSGTTNYNPSLKSRVTISVDTSKNQFSLKLSSVTAADTAVYYCARIAVAGFFFDYWGQGTLVTVSSGGGGSGGGGSGGGGSEIVLTQSPGTLSLSPGERATLSCRASQSVNKNYLAWYQQKPGQAPRLLIYGASSRATGIPDRFSGSGSGTDFTLTISRLEPEDFAVYYCQQYDRSPLTFGGGTKVEIKSGGGGSEVQLVESGGGLVQPGGSLKLSCAASGFTFNKYAMNWVRQAPGKGLEWVARIRSKYNNYATYYADSVKDRFTISRDDSKNTAYLQMNNLKTEDTAVYYCVRHGNFGNSYISYWAYWGQGTLVTVSSGGGGSGGGGSGGGGSQTVVTQEPSLTVSPGGTVTLTCGSSTGAVTSGNYPNWVQQKPGQAPRGLIGGTKFLAPGTPARFSGSLLGGKAALTLSGVQPEDEAEYYCVLWYSNRWVFGGGTKLTVLPGGGGSDAHKSEVAHRFKDLGEENFKALVLIAFAQYLQQCPFEDHVKLVNEVTEFAKTCVADESAENCDKSLHTLFGDKLCTVATLRETYGEMADCCAKQEPERNECFLQHKDDNPNLPRLVRPEVDVMCTAFHDNEETFLKKYLYEIARRHPYFYAPELLFFAKRYKAAFTECCQAADKAACLLPKLDELRDEGKASSAKQRLKCASLQKFGERAFKAWAVARLSQRFPKAEFAEVSKLVTDLTKVHTECCHGDLLECADDRADLAKYICENQDSISSKLKECCEKPLLEKSHCIAEVENDEMPADLPSLAADFVESKDVCKNYAEAKDVFLGMFLYEYARRHPDYSVVLLLRLAKTYETTLEKCCAAADPHECYAKVFDEFKPLVEEPQNLIKQNCELFEQLGEYKFQNALLVRYTKKVPQVSTPTLVEVSRNLGKVGSKCCKHPEAKRMPCAEDYLSVVLNQLCVLHEKTPVSDRVTKCCTESLVNRRPCFSALEVDETYVPKEFNAETFTFHADICTLSEKERQIKKQTALVELVKHKPKATKEQLKAVMDDFAAFVEKCCKADDKETCFAEEGKKLVAASQAALGLHHHHHH

SEQ ID NO: 2252 - protein, 1093 aa, synthetic construct
QVQLQEWGPGLVKPSETLSLTCTVSGASISSFYWSWIRQPPGKGLEWIGYIYYSGTTNYNPSLKSRVTISVDTSKNQLSLKLSSVTAADTAVYYCARIAVAGFFFDYWGQGTLVTVSSGGGGSGGGGSGGGGSEIVLTQSPGTLSLSPGERATLSCRASQSVNKNYLAWYQQKPGQAPRLLIYGASSRATGIPDRFSGSGSGTDFTLTISRLEPEDFAVYYCQQYDRSPLTFGGGTKVDIKSGGGGSEVQLVESGGGLVQPGGSLKLSCAASGFTFNKYAMNWVRQAPGKGLEWVARIRSKYNNYATYYADSVKDRFTISRDDSKNTAYLQMNNLKTEDTAVYYCVRHGNFGNSYISYWAYWGQGTLVTVSSGGGGSGGGGSGGGGSQTVVTQEPSLTVSPGGTVTLTCGSSTGAVTSGNYPNWVQQKPGQAPRGLIGGTKFLAPGTPARFSGSLLGGKAALTLSGVQPEDEAEYYCVLWYSNRWVFGGGTKLTVLPGGGGSDAHKSEVAHRFKDLGEENFKALVLIAFAQYLQQCPFEDHVKLVNEVTEFAKTCVADESAENCDKSLHTLFGDKLCTVATLRETYGEMADCCAKQEPERNECFLQHKDDNPNLPRLVRPEVDVMCTAFHDNEETFLKKYLYEIARRHPYFYAPELLFFAKRYKAAFTECCQAADKAACLLPKLDELRDEGKASSAKQRLKCASLQKFGERAFKAWAVARLSQRFPKAEFAEVSKLVTDLTKVHTECCHGDLLECADDRADLAKYICENQDSISSKLKECCEKPLLEKSHCIAEVENDEMPADLPSLAADFVESKDVCKNYAEAKDVFLGMFLYEYARRHPDYSVVLLLRLAKTYETTLEKCCAAADPHECYAKVFDEFKPLVEEPQNLIKQNCELFEQLGEYKFQNALLVRYTKKVPQVSTPTLVEVSRNLGKVGSKCCKHPEAKRMPCAEDYLSVVLNQLCVLHEKTPVSDRVTKCCTESLVNRRPCFSALEVDETYVPKEFNAETFTFHADICTLSEKERQIKKQTALVELVKHKPKATKEQLKAVMDDFAAFVEKCCKADDKETCFAEEGKKLVAASQAALGLHHHHHH

SEQ ID NO: 2253 - protein, 1093 aa, synthetic construct
QVQLQESGPGLVKPSETLSLTCTVSGASISSFYWSWIRQPPGKGLEWIGYIYYSGTTNYNPSLKSRVTISVDTSKNQFSLKLSSVTAADTAVYYCARIAVAGFFFDYWGQGTLVTVSSGGGGSGGGGSGGGGSEIVLTQSPGTLSLSPGESATLSCRASQSVNKNYLAWYQQKPGQAPRLLIYGASSRATGIPDRFSGSGSGTDFTLTISRLEPEDFAVYYCQQYDRSPLTFGGGTRLEIKSGGGGSEVQLVESGGGLVQPGGSLKLSCAASGFTFNKYAMNWVRQAPGKGLEWVARIRSKYNNYATYYADSVKDRFTISRDDSKNTAYLQMNNLKTEDTAVYYCVRHGNFGNSYISYWAYWGQGTLVTVSSGGGGSGGGGSGGGGSQTVVTQEPSLTVSPGGTVTLTCGSSTGAVTSGNYPNWVQQKPGQAPRGLIGGTKFLAPGTPARFSGSLLGGKAALTLSGVQPEDEAEYYCVLWYSNRWVFGGGTKLTVLPGGGGSDAHKSEVAHRFKDLGEENFKALVLIAFAQYLQQCPFEDHVKLVNEVTEFAKTCVADESAENCDKSLHTLFGDKLCTVATLRETYGEMADCCAKQEPERNECFLQHKDDNPNLPRLVRPEVDVMCTAFHDNEETFLKKYLYEIARRHPYFYAPELLFFAKRYKAAFTECCQAADKAACLLPKLDELRDEGKASSAKQRLKCASLQKFGERAFKAWAVARLSQRFPKAEFAEVSKLVTDLTKVHTECCHGDLLECADDRADLAKYICENQDSISSKLKECCEKPLLEKSHCIAEVENDEMPADLPSLAADFVESKDVCKNYAEAKDVFLGMFLYEYARRHPDYSVVLLLRLAKTYETTLEKCCAAADPHECYAKVFDEFKPLVEEPQNLIKQNCELFEQLGEYKFQNALLVRYTKKVPQVSTPTLVEVSRNLGKVGSKCCKHPEAKRMPCAEDYLSVVLNQLCVLHEKTPVSDRVTKCCTESLVNRRPCFSALEVDETYVPKEFNAETFTFHADICTLSEKERQIKKQTALVELVKHKPKATKEQLKAVMDDFAAFVEKCCKADDKETCFAEEGKKLVAASQAALGLHHHHHH

SEQ ID NO: 2254 - protein, 1093 aa, synthetic construct
QVQLQESGPGLVKPSQTLSLTCTVSGGSISSYYWSWIRQPPGKGLEWIGYIFYNGITNYNPSLKSRVTISLDTSKNQFSLKLSSVTAADTAKYYCARIHSGSFSFDYWDQGTLVTVSSGGGGSGGGGSGGGGSEIVMTQSPGTLSLSPGERATLSCRASQSVSRGYLAWYQQKPGQAPRLLIYGASSRATDIPDRFSGSGSGTDFTLTISRLEPEDFAVYYCQQYDTSPITFGQGTKVEIKSGGGGSEVQLVESGGGLVQPGGSLKLSCAASGFTFNKYAMNWVRQAPGKGLEWVARIRSKYNNYATYYADSVKDRFTISRDDSKNTAYLQMNNLKTEDTAVYYCVRHGNFGNSYISYWAYWGQGTLVTVSSGGGGSGGGGSGGGGSQTVVTQEPSLTVSPGGTVTLTCGSSTGAVTSGNYPNWVQQKPGQAPRGLIGGTKFLAPGTPARFSGSLLGGKAALTLSGVQPEDEAEYYCVLWYSNRWVFGGGTKLTVLPGGGGSDAHKSEVAHRFKDLGEENFKALVLIAFAQYLQQCPFEDHVKLVNEVTEFAKTCVADESAENCDKSLHTLFGDKLCTVATLRETYGEMADCCAKQEPERNECFLQHKDDNPNLPRLVRPEVDVMCTAFHDNEETFLKKYLYEIARRHPYFYAPELLFFAKRYKAAFTECCQAADKAACLLPKLDELRDEGKASSAKQRLKCASLQKFGERAFKAWAVARLSQRFPKAEFAEVSKLVTDLTKVHTECCHGDLLECADDRADLAKYICENQDSISSKLKECCEKPLLEKSHCIAEVENDEMPADLPSLAADFVESKDVCKNYAEAKDVFLGMFLYEYARRHPDYSVVLLLRLAKTYETTLEKCCAAADPHECYAKVFDEFKPLVEEPQNLIKQNCELFEQLGEYKFQNALLVRYTKKVPQVSTPTLVEVSRNLGKVGSKCCKHPEAKRMPCAEDYLSVVLNQLCVLHEKTPVSDRVTKCCTESLVNRRPCFSALEVDETYVPKEFNAETFTFHADICTLSEKERQIKKQTALVELVKHKPKATKEQLKAVMDDFAAFVEKCCKADDKETCFAEEGKKLVAASQAALGLHHHHHH

SEQ ID NO: 2255 - protein, 1100 aa, synthetic construct
EVQLVESGGGLVKPGGSLRLSCAASGFIFNNAGMSWVRQAPGKGLEWVGRIKNKIDGGTTDFAAPVKGRFTISRDDSKNTLYLQMNSLKAEDTAVYYCTARGWYGDYFDYWGQGTLVTVSSGGGGSGGGGSGGGGSDIVMTQTPLSLPVTPGEPASISCRSSQSLLHSNGYNYLDWYLQKPGQSPQLLIYLGSNRASGVPDRFSGSGSGTDFTLKISRVEAEDVGIYYCMQALQTPFTFGPGTKVEIKSGGGGSEVQLVESGGGLVQPGGSLKLSCAASGFTFNKYAMNWVRQAPGKGLEWVARIRSKYNNYATYYADSVKDRFTISRDDSKNTAYLQMNNLKTEDTAVYYCVRHGNFGNSYISYWAYWGQGTLVTVSSGGGGSGGGGSGGGGSQTVVTQEPSLTVSPGGTVTLTCGSSTGAVTSGNYPNWVQQKPGQAPRGLIGGTKFLAPGTPARFSGSLLGGKAALTLSGVQPEDEAEYYCVLWYSNRWVFGGGTKLTVLPGGGGSDAHKSEVAHRFKDLGEENFKALVLIAFAQYLQQCPFEDHVKLVNEVTEFAKTCVADESAENCDKSLHTLFGDKLCTVATLRETYGEMADCCAKQEPERNECFLQHKDDNPNLPRLVRPEVDVMCTAFHDNEETFLKKYLYEIARRHPYFYAPELLFFAKRYKAAFTECCQAADKAACLLPKLDELRDEGKASSAKQRLKCASLQKFGERAFKAWAVARLSQRFPKAEFAEVSKLVTDLTKVHTECCHGDLLECADDRADLAKYICENQDSISSKLKECCEKPLLEKSHCIAEVENDEMPADLPSLAADFVESKDVCKNYAEAKDVFLGMFLYEYARRHPDYSVVLLLRLAKTYETTLEKCCAAADPHECYAKVFDEFKPLVEEPQNLIKQNCELFEQLGEYKFQNALLVRYTKKVPQVSTPTLVEVSRNLGKVGSKCCKHPEAKRMPCAEDYLSVVLNQLCVLHEKTPVSDRVTKCCTESLVNRRPCFSALEVDETYVPKEFNAETFTFHADICTLSEKERQIKKQTALVELVKHKPKATKEQLKAVMDDFAAFVEKCCKADDKETCFAEEGKKLVAASQAALGLHHHHHH

SEQ ID NO: 2256 - protein, 1101 aa, synthetic construct
QVQLVESGGGVVQPGRSLRLSCAASGFSFSSYDIHWVRQAPGKGLEWVAVISSHGSNKNYARSVKGRFTISRDNSKNTLYLQMNSLKAEDTAVYYCARDGYSGNDPFYYYYHGMDVWGQGTTVTVSSGGGGSGGGGSGGGGSDIQMTQSPSSLSASVGDRVTITCRASQSISSYLNWYQQKPGKAPKLLIYAASSLQSGVPSRFSGSGSGTDFSLTISSLQPEDFATYYCQQSFTTPLTFGGGTKVEIKSGGGGSEVQLVESGGGLVQPGGSLKLSCAASGFTFNKYAMNWVRQAPGKGLEWVARIRSKYNNYATYYADSVKDRFTISRDDSKNTAYLQMNNLKTEDTAVYYCVRHGNFGNSYISYWAYWGQGTLVTVSSGGGGSGGGGSGGGGSQTVVTQEPSLTVSPGGTVTLTCGSSTGAVTSGNYPNWVQQKPGQAPRGLIGGTKFLAPGTPARFSGSLLGGKAALTLSGVQPEDEAEYYCVLWYSNRWVFGGGTKLTVLPGGGGSDAHKSEVAHRFKDLGEENFKALVLIAFAQYLQQCPFEDHVKLVNEVTEFAKTCVADESAENCDKSLHTLFGDKLCTVATLRETYGEMADCCAKQEPERNECFLQHKDDNPNLPRLVRPEVDVMCTAFHDNEETFLKKYLYEIARRHPYFYAPELLFFAKRYKAAFTECCQAADKAACLLPKLDELRDEGKASSAKQRLKCASLQKFGERAFKAWAVARLSQRFPKAEFAEVSKLVTDLTKVHTECCHGDLLECADDRADLAKYICENQDSISSKLKECCEKPLLEKSHCIAEVENDEMPADLPSLAADFVESKDVCKNYAEAKDVFLGMFLYEYARRHPDYSVVLLLRLAKTYETTLEKCCAAADPHECYAKVFDEFKPLVEEPQNLIKQNCELFEQLGEYKFQNALLVRYTKKVPQVSTPTLVEVSRNLGKVGSKCCKHPEAKRMPCAEDYLSVVLNQLCVLHEKTPVSDRVTKCCTESLVNRRPCFSALEVDETYVPKEFNAETFTFHADICTLSEKERQIKKQTALVELVKHKPKATKEQLKAVMDDFAAFVEKCCKADDKETCFAEEGKKLVAASQAALGLHHHHHH

SEQ ID NO: 2257 - protein, 1102 aa, synthetic construct
QVQLVQSGAEVKKPGASVKVSCKASGYTFTSYYMHWVRQAPGQGLEWMGIINPSDGSTNYAQNFQGRVTMTRDTSTNTVYMELSSLRSEDTAVYYCARGGNSAFYSYYDMDVWGQGTTVTVSSGGGGSGGGGSGGGGSDVVMTQSPLSLPVTLGQPASISCRSSQSLVYRDGNTYLSWFQQRPGQSPRRLIYKVSNWQSGVPDRFSGSGSGTDFTLKISRVEAEDVGVYFCMQGTHWPPTFGQGTKVEIKSGGGGSEVQLVESGGGLVQPGGSLKLSCAASGFTFNKYAMNWVRQAPGKGLEWVARIRSKYNNYATYYADSVKDRFTISRDDSKNTAYLQMNNLKTEDTAVYYCVRHGNFGNSYISYWAYWGQGTLVTVSSGGGGSGGGGSGGGGSQTVVTQEPSLTVSPGGTVTLTCGSSTGAVTSGNYPNWVQQKPGQAPRGLIGGTKFLAPGTPARFSGSLLGGKAALTLSGVQPEDEAEYYCVLWYSNRWVFGGGTKLTVLPGGGGSDAHKSEVAHRFKDLGEENFKALVLIAFAQYLQQCPFEDHVKLVNEVTEFAKTCVADESAENCDKSLHTLFGDKLCTVATLRETYGEMADCCAKQEPERNECFLQHKDDNPNLPRLVRPEVDVMCTAFHDNEETFLKKYLYEIARRHPYFYAPELLFFAKRYKAAFTECCQAADKAACLLPKLDELRDEGKASSAKQRLKCASLQKFGERAFKAWAVARLSQRFPKAEFAEVSKLVTDLTKVHTECCHGDLLECADDRADLAKYICENQDSISSKLKECCEKPLLEKSHCIAEVENDEMPADLPSLAADFVESKDVCKNYAEAKDVFLGMFLYEYARRHPDYSVVLLLRLAKTYETTLEKCCAAADPHECYAKVFDEFKPLVEEPQNLIKQNCELFEQLGEYKFQNALLVRYTKKVPQVSTPTLVEVSRNLGKVGSKCCKHPEAKRMPCAEDYLSVVLNQLCVLHEKTPVSDRVTKCCTESLVNRRPCFSALEVDETYVPKEFNAETFTFHADICTLSEKERQIKKQTALVELVKHKPKATKEQLKAVMDDFAAFVEKCCKADDKETCFAEEGKKLVAASQAALGLHHHHHH

SEQ ID NO: 2258 - protein, 1102 aa, synthetic construct
QVQLVQSGAEVKKPGASVKVSCKASGYTFTNYYMHWVRQAPGLGLEWMGIINPSDGSTSYAQKFQGRVTMTRDTSTNTVYMDLSSLRSEDTAVYYCARGGNSAFYSYYDMDVWGQGTTVTVSSGGGGSGGGGSGGGGSDVVMTQTPLSLPVTLGQPASISCRSSQSLVYRDGNTYLSWFQQRPGQSPRRLIYKVSNWQSGVPDRFSGGGSGTDFTLKISRVEAEDVGVYYCMQGTHWPPTFGQGTKVEIKSGGGGSEVQLVESGGGLVQPGGSLKLSCAASGFTFNKYAMNWVRQAPGKGLEWVARIRSKYNNYATYYADSVKDRFTISRDDSKNTAYLQMNNLKTEDTAVYYCVRHGNFGNSYISYWAYWGQGTLVTVSSGGGGSGGGGSGGGGSQTVVTQEPSLTVSPGGTVTLTCGSSTGAVTSGNYPNWVQQKPGQAPRGLIGGTKFLAPGTPARFSGSLLGGKAALTLSGVQPEDEAEYYCVLWYSNRWVFGGGTKLTVLPGGGGSDAHKSEVAHRFKDLGEENFKALVLIAFAQYLQQCPFEDHVKLVNEVTEFAKTCVADESAENCDKSLHTLFGDKLCTVATLRETYGEMADCCAKQEPERNECFLQHKDDNPNLPRLVRPEVDVMCTAFHDNEETFLKKYLYEIARRHPYFYAPELLFFAKRYKAAFTECCQAADKAACLLPKLDELRDEGKASSAKQRLKCASLQKFGERAFKAWAVARLSQRFPKAEFAEVSKLVTDLTKVHTECCHGDLLECADDRADLAKYICENQDSISSKLKECCEKPLLEKSHCIAEVENDEMPADLPSLAADFVESKDVCKNYAEAKDVFLGMFLYEYARRHPDYSVVLLLRLAKTYETTLEKCCAAADPHECYAKVFDEFKPLVEEPQNLIKQNCELFEQLGEYKFQNALLVRYTKKVPQVSTPTLVEVSRNLGKVGSKCCKHPEAKRMPCAEDYLSVVLNQLCVLHEKTPVSDRVTKCCTESLVNRRPCFSALEVDETYVPKEFNAETFTFHADICTLSEKERQIKKQTALVELVKHKPKATKEQLKAVMDDFAAFVEKCCKADDKETCFAEEGKKLVAASQAALGLHHHHHH

SEQ ID NO: 2259 - protein, 1102 aa, synthetic construct
QVQLVQSGAEVKKPGASVKVSCKASGYTFTGYYIHWVRQAPGQGLEWMGIINPSDGSTSYGQNFQGRVTMTRDTSTNTVYMELSSLRSEDTAVYYCARGGNSAFYSYYDMDVWGQGTTVTVSSGGGGSGGGGSGGGGSDVVMTQSPLSLPVTLGQPASISCRSSQSLAYRDGNTYLSWFQQRPGQSPRRLIYKVSNWQSGVPDRFSGSGSGTDFTLKISRVEAEDVGVYFCMQGTHWPPTFGQGTKVEIKSGGGGSEVQLVESGGGLVQPGGSLKLSCAASGFTFNKYAMNWVRQAPGKGLEWVARIRSKYNNYATYYADSVKDRFTISRDDSKNTAYLQMNNLKTEDTAVYYCVRHGNFGNSYISYWAYWGQGTLVTVSSGGGGSGGGGSGGGGSQTVVTQEPSLTVSPGGTVTLTCGSSTGAVTSGNYPNWVQQKPGQAPRGLIGGTKFLAPGTPARFSGSLLGGKAALTLSGVQPEDEAEYYCVLWYSNRWVFGGGTKLTVLPGGGGSDAHKSEVAHRFKDLGEENFKALVLIAFAQYLQQCPFEDHVKLVNEVTEFAKTCVADESAENCDKSLHTLFGDKLCTVATLRETYGEMADCCAKQEPERNECFLQHKDDNPNLPRLVRPEVDVMCTAFHDNEETFLKKYLYEIARRHPYFYAPELLFFAKRYKAAFTECCQAADKAACLLPKLDELRDEGKASSAKQRLKCASLQKFGERAFKAWAVARLSQRFPKAEFAEVSKLVTDLTKVHTECCHGDLLECADDRADLAKYICENQDSISSKLKECCEKPLLEKSHCIAEVENDEMPADLPSLAADFVESKDVCKNYAEAKDVFLGMFLYEYARRHPDYSVVLLLRLAKTYETTLEKCCAAADPHECYAKVFDEFKPLVEEPQNLIKQNCELFEQLGEYKFQNALLVRYTKKVPQVSTPTLVEVSRNLGKVGSKCCKHPEAKRMPCAEDYLSVVLNQLCVLHEKTPVSDRVTKCCTESLVNRRPCFSALEVDETYVPKEFNAETFTFHADICTLSEKERQIKKQTALVELVKHKPKATKEQLKAVMDDFAAFVEKCCKADDKETCFAEEGKKLVAASQAALGLHHHHHH

SEQ ID NO: 2260 - protein, 1102 aa, synthetic construct
QVQLVQSGAEVKKPGASVKVSCKASGYTFTGHYMHWVRQAPGQGLEWMGIINPSDGSTNYAQKFQGRVTMTRDTSTSTVYMELRSLRSEDTAVYYCTRGTTVVHYSYYDMDVWGQGTTVTVSSGGGGSGGGGSGGGGSDVVMTQTPLSLPVTLGQPASISCRSSQSLVYRDGNTYLTWFQQRPGQSPRRLIYKVSNWQSGVPDRFSGSGSGTDFTLKISRVEAEDVGVYYCMQGTHWPPTFGGGTKVEIKSGGGGSEVQLVESGGGLVQPGGSLKLSCAASGFTFNKYAMNWVRQAPGKGLEWVARIRSKYNNYATYYADSVKDRFTISRDDSKNTAYLQMNNLKTEDTAVYYCVRHGNFGNSYISYWAYWGQGTLVTVSSGGGGSGGGGSGGGGSQTVVTQEPSLTVSPGGTVTLTCGSSTGAVTSGNYPNWVQQKPGQAPRGLIGGTKFLAPGTPARFSGSLLGGKAALTLSGVQPEDEAEYYCVLWYSNRWVFGGGTKLTVLPGGGGSDAHKSEVAHRFKDLGEENFKALVLIAFAQYLQQCPFEDHVKLVNEVTEFAKTCVADESAENCDKSLHTLFGDKLCTVATLRETYGEMADCCAKQEPERNECFLQHKDDNPNLPRLVRPEVDVMCTAFHDNEETFLKKYLYEIARRHPYFYAPELLFFAKRYKAAFTECCQAADKAACLLPKLDELRDEGKASSAKQRLKCASLQKFGERAFKAWAVARLSQRFPKAEFAEVSKLVTDLTKVHTECCHGDLLECADDRADLAKYICENQDSISSKLKECCEKPLLEKSHCIAEVENDEMPADLPSLAADFVESKDVCKNYAEAKDVFLGMFLYEYARRHPDYSVVLLLRLAKTYETTLEKCCAAADPHECYAKVFDEFKPLVEEPQNLIKQNCELFEQLGEYKFQNALLVRYTKKVPQVSTPTLVEVSRNLGKVGSKCCKHPEAKRMPCAEDYLSVVLNQLCVLHEKTPVSDRVTKCCTESLVNRRPCFSALEVDETYVPKEFNAETFTFHADICTLSEKERQIKKQTALVELVKHKPKATKEQLKAVMDDFAAFVEKCCKADDKETCFAEEGKKLVAASQAALGLHHHHHH

SEQ ID NO: 2261 - protein, 1102 aa, synthetic construct
QVQLVQSGAEVKKPGASVKVSCKASGYTFTNYFMHWVRQAPGLGLEWMGIINPSDGSTSYAQNFQGRVTMTRDTSTNTVYMELSSLRSEDTAVYYCARGGNSAFYSYYDMDVWGQGTTVTVSSGGGGSGGGGSGGGGSDVVMTQSPLSLPVTLGQPASISCRSSQSLVYRDGNTYLSWFQQRPGQSPRRLIYRVSNWQSGVPDRFSGSGSGTDFTLKISRVEAEDVGVYFCMQGTYWPPTFGQGTKVDIKSGGGGSEVQLVESGGGLVQPGGSLKLSCAASGFTFNKYAMNWVRQAPGKGLEWVARIRSKYNNYATYYADSVKDRFTISRDDSKNTAYLQMNNLKTEDTAVYYCVRHGNFGNSYISYWAYWGQGTLVTVSSGGGGSGGGGSGGGGSQTVVTQEPSLTVSPGGTVTLTCGSSTGAVTSGNYPNWVQQKPGQAPRGLIGGTKFLAPGTPARFSGSLLGGKAALTLSGVQPEDEAEYYCVLWYSNRWVFGGGTKLTVLPGGGGSDAHKSEVAHRFKDLGEENFKALVLIAFAQYLQQCPFEDHVKLVNEVTEFAKTCVADESAENCDKSLHTLFGDKLCTVATLRETYGEMADCCAKQEPERNECFLQHKDDNPNLPRLVRPEVDVMCTAFHDNEETFLKKYLYEIARRHPYFYAPELLFFAKRYKAAFTECCQAADKAACLLPKLDELRDEGKASSAKQRLKCASLQKFGERAFKAWAVARLSQRFPKAEFAEVSKLVTDLTKVHTECCHGDLLECADDRADLAKYICENQDSISSKLKECCEKPLLEKSHCIAEVENDEMPADLPSLAADFVESKDVCKNYAEAKDVFLGMFLYEYARRHPDYSVVLLLRLAKTYETTLEKCCAAADPHECYAKVFDEFKPLVEEPQNLIKQNCELFEQLGEYKFQNALLVRYTKKVPQVSTPTLVEVSRNLGKVGSKCCKHPEAKRMPCAEDYLSVVLNQLCVLHEKTPVSDRVTKCCTESLVNRRPCFSALEVDETYVPKEFNAETFTFHADICTLSEKERQIKKQTALVELVKHKPKATKEQLKAVMDDFAAFVEKCCKADDKETCFAEEGKKLVAASQAALGLHHHHHH

SEQ ID NO: 2262 - protein, 1097 aa, synthetic construct
QVQLVESGGGAVQPGRSLRLSCAASGFTFSNYGMHWVRQAPGKGLEWVAVISHHGSSKYYARSVKGRFTISRDNSKNTLYLEMNSLRAEDTAVYYCARDWWELVFDYWGQGTLVTVSSGGGGSGGGGSGGGGSDIVMTQTPLSLSVTPGQPASISCKSSQSLLHSDGKTFLYWYLQKPGQPPQLLIYEVSNRFSGVPDRFSGSGSGTDFTLKISRVEAEDVGVYYCLQGIHLPFTFGPGTKVEIKSGGGGSEVQLVESGGGLVQPGGSLKLSCAASGFTFNKYAMNWVRQAPGKGLEWVARIRSKYNNYATYYADSVKDRFTISRDDSKNTAYLQMNNLKTEDTAVYYCVRHGNFGNSYISYWAYWGQGTLVTVSSGGGGSGGGGSGGGGSQTVVTQEPSLTVSPGGTVTLTCGSSTGAVTSGNYPNWVQQKPGQAPRGLIGGTKFLAPGTPARFSGSLLGGKAALTLSGVQPEDEAEYYCVLWYSNRWVFGGGTKLTVLPGGGGSDAHKSEVAHRFKDLGEENFKALVLIAFAQYLQQCPFEDHVKLVNEVTEFAKTCVADESAENCDKSLHTLFGDKLCTVATLRETYGEMADCCAKQEPERNECFLQHKDDNPNLPRLVRPEVDVMCTAFHDNEETFLKKYLYEIARRHPYFYAPELLFFAKRYKAAFTECCQAADKAACLLPKLDELRDEGKASSAKQRLKCASLQKFGERAFKAWAVARLSQRFPKAEFAEVSKLVTDLTKVHTECCHGDLLECADDRADLAKYICENQDSISSKLKECCEKPLLEKSHCIAEVENDEMPADLPSLAADFVESKDVCKNYAEAKDVFLGMFLYEYARRHPDYSVVLLLRLAKTYETTLEKCCAAADPHECYAKVFDEFKPLVEEPQNLIKQNCELFEQLGEYKFQNALLVRYTKKVPQVSTPTLVEVSRNLGKVGSKCCKHPEAKRMPCAEDYLSVVLNQLCVLHEKTPVSDRVTKCCTESLVNRRPCFSALEVDETYVPKEFNAETFTFHADICTLSEKERQIKKQTALVELVKHKPKATKEQLKAVMDDFAAFVEKCCKADDKETCFAEEGKKLVAASQAALGLHHHHHH

SEQ ID NO: 2263 - protein, 1099 aa, synthetic construct
QVTLKESGPMLVKPTETLTLTCTVSGFSLSNSRMGVSWIRQPPGRALEWLAHIFSNDGKSYSTSLKSRLTISKDTSKSQVVLTMTNMDPVDTATYYCARYNYDSSGYYYSFFDYWGQGTLVTVSSGGGGSGGGGSGGGGSDIQMTQSPSSLSASVGDRVTITCRASQSISSYLNWYQQKPGKAPKLLIYAASSLQSGVPSRFSGSGSGTDFTLTISSLQPEDFATYYCQQGYSSPFTFGGGTKVEIKSGGGGSEVQLVESGGGLVQPGGSLKLSCAASGFTFNKYAMNWVRQAPGKGLEWVARIRSKYNNYATYYADSVKDRFTISRDDSKNTAYLQMNNLKTEDTAVYYCVRHGNFGNSYISYWAYWGQGTLVTVSSGGGGSGGGGSGGGGSQTVVTQEPSLTVSPGGTVTLTCGSSTGAVTSGNYPNWVQQKPGQAPRGLIGGTKFLAPGTPARFSGSLLGGKAALTLSGVQPEDEAEYYCVLWYSNRWVFGGGTKLTVLPGGGGSDAHKSEVAHRFKDLGEENFKALVLIAFAQYLQQCPFEDHVKLVNEVTEFAKTCVADESAENCDKSLHTLFGDKLCTVATLRETYGEMADCCAKQEPERNECFLQHKDDNPNLPRLVRPEVDVMCTAFHDNEETFLKKYLYEIARRHPYFYAPELLFFAKRYKAAFTECCQAADKAACLLPKLDELRDEGKASSAKQRLKCASLQKFGERAFKAWAVARLSQRFPKAEFAEVSKLVTDLTKVHTECCHGDLLECADDRADLAKYICENQDSISSKLKECCEKPLLEKSHCIAEVENDEMPADLPSLAADFVESKDVCKNYAEAKDVFLGMFLYEYARRHPDYSVVLLLRLAKTYETTLEKCCAAADPHECYAKVFDEFKPLVEEPQNLIKQNCELFEQLGEYKFQNALLVRYTKKVPQVSTPTLVEVSRNLGKVGSKCCKHPEAKRMPCAEDYLSVVLNQLCVLHEKTPVSDRVTKCCTESLVNRRPCFSALEVDETYVPKEFNAETFTFHADICTLSEKERQIKKQTALVELVKHKPKATKEQLKAVMDDFAAFVEKCCKADDKETCFAEEGKKLVAASQAALGLHHHHHH

SEQ ID NO: 2264 - protein, 1099 aa, synthetic construct
QVTLKESGPVLVKPTETLTLTCTVSGFSLSNARMGVSWLRQPPGKALEWLAHIFSTDEKSYSTSLKSRLTISKDTSKSQVVLTMTNMDPVDTATYYCARYYYDSSGYYYSFFDYWGQGTLVTVSSGGGGSGGGGSGGGGSDIQMTQSPSSLSASVGDRVTITCRASQSIRSYLNWYQQKPGKAPKLLIYGASNLQSGVPSRFSGSGSGTDFTLTISSLQPEDFATYYCQQSYSSPFTFGGGTKVEIKSGGGGSEVQLVESGGGLVQPGGSLKLSCAASGFTFNKYAMNWVRQAPGKGLEWVARIRSKYNNYATYYADSVKDRFTISRDDSKNTAYLQMNNLKTEDTAVYYCVRHGNFGNSYISYWAYWGQGTLVTVSSGGGGSGGGGSGGGGSQTVVTQEPSLTVSPGGTVTLTCGSSTGAVTSGNYPNWVQQKPGQAPRGLIGGTKFLAPGTPARFSGSLLGGKAALTLSGVQPEDEAEYYCVLWYSNRWVFGGGTKLTVLPGGGGSDAHKSEVAHRFKDLGEENFKALVLIAFAQYLQQCPFEDHVKLVNEVTEFAKTCVADESAENCDKSLHTLFGDKLCTVATLRETYGEMADCCAKQEPERNECFLQHKDDNPNLPRLVRPEVDVMCTAFHDNEETFLKKYLYEIARRHPYFYAPELLFFAKRYKAAFTECCQAADKAACLLPKLDELRDEGKASSAKQRLKCASLQKFGERAFKAWAVARLSQRFPKAEFAEVSKLVTDLTKVHTECCHGDLLECADDRADLAKYICENQDSISSKLKECCEKPLLEKSHCIAEVENDEMPADLPSLAADFVESKDVCKNYAEAKDVFLGMFLYEYARRHPDYSVVLLLRLAKTYETTLEKCCAAADPHECYAKVFDEFKPLVEEPQNLIKQNCELFEQLGEYKFQNALLVRYTKKVPQVSTPTLVEVSRNLGKVGSKCCKHPEAKRMPCAEDYLSVVLNQLCVLHEKTPVSDRVTKCCTESLVNRRPCFSALEVDETYVPKEFNAETFTFHADICTLSEKERQIKKQTALVELVKHKPKATKEQLKAVMDDFAAFVEKCCKADDKETCFAEEGKKLVAASQAALGLHHHHHH

SEQ ID NO: 2265 - protein, 1095 aa, synthetic construct
QVQLVQSGAEVKKPGASVKVSCKASGYAFTSYYIHWVRQAPGQGLEWMGIINPSGGSKSYAQKFRGRVTMTRDTSTSTVYMELSSLTSEDTAVYYCARSMSTVTSDAFDIWGQGTMVTVSSGGGGSGGGGSGGGGSDIQMTQSPSSLSASVGDRVTITCRASQSISNYLNWYQQKPGKAPKLLIYAASSLQSGVPSRFSGSGSGTEFTLTISSLQPEDFATYYCQQSYSAPLTFGGGTKVDIKSGGGGSEVQLVESGGGLVQPGGSLKLSCAASGFTFNKYAMNWVRQAPGKGLEWVARIRSKYNNYATYYADSVKDRFTISRDDSKNTAYLQMNNLKTEDTAVYYCVRHGNFGNSYISYWAYWGQGTLVTVSSGGGGSGGGGSGGGGSQTVVTQEPSLTVSPGGTVTLTCGSSTGAVTSGNYPNWVQQKPGQAPRGLIGGTKFLAPGTPARFSGSLLGGKAALTLSGVQPEDEAEYYCVLWYSNRWVFGGGTKLTVLPGGGGSDAHKSEVAHRFKDLGEENFKALVLIAFAQYLQQCPFEDHVKLVNEVTEFAKTCVADESAENCDKSLHTLFGDKLCTVATLRETYGEMADCCAKQEPERNECFLQHKDDNPNLPRLVRPEVDVMCTAFHDNEETFLKKYLYEIARRHPYFYAPELLFFAKRYKAAFTECCQAADKAACLLPKLDELRDEGKASSAKQRLKCASLQKFGERAFKAWAVARLSQRFPKAEFAEVSKLVTDLTKVHTECCHGDLLECADDRADLAKYICENQDSISSKLKECCEKPLLEKSHCIAEVENDEMPADLPSLAADFVESKDVCKNYAEAKDVFLGMFLYEYARRHPDYSVVLLLRLAKTYETTLEKCCAAADPHECYAKVFDEFKPLVEEPQNLIKQNCELFEQLGEYKFQNALLVRYTKKVPQVSTPTLVEVSRNLGKVGSKCCKHPEAKRMPCAEDYLSVVLNQLCVLHEKTPVSDRVTKCCTESLVNRRPCFSALEVDETYVPKEFNAETFTFHADICTLSEKERQIKKQTALVELVKHKPKATKEQLKAVMDDFAAFVEKCCKADDKETCFAEEGKKLVAASQAALGLHHHHHH

SEQ ID NO: 2266 - protein, 1093 aa, synthetic construct
QVQLQESGPGLVKPSETLSLTCTVSGGSISSYYWSWIRQPPGKGLEWIGYVYYSGTTNYNPSLKSRVTISVDTSKNQFSLKLSSVTAADTAVYYCASIAVTGFYFDYWGQGTLVTVSSGGGGSGGGGSGGGGSEIVLTQSPGTLSLSPGERVTLSCRASQRVNNNYLAWYQQRPGQAPRLLIYGASSRATGIPDRFSGSGSGTDFTLTISRLEPEDFAVYYCQQYDRSPLTFGGGTKLEIKSGGGGSEVQLVESGGGLVQPGGSLRLSCAASGFTFNSYAMNWVRQAPGKGLEWVARIRSKYNNYATYYADSVKGRFTISRDDSKNTAYLQMNSLKTEDTAVYYCVRHGNFGNSYVSWWAYWGQGTLVTVSSGGGGSGGGGSGGGGSQTVVTQEPSLTVSPGGTVTLTCGSSTGAVTSGNYPNWVQQKPGQAPRGLIGGTKFLAPGTPARFSGSLLGGKAALTLSGVQPEDEAEYYCVLWYSNRWVFGGGTKLTVLPGGGGSDAHKSEVAHRFKDLGEENFKALVLIAFAQYLQQCPFEDHVKLVNEVTEFAKTCVADESAENCDKSLHTLFGDKLCTVATLRETYGEMADCCAKQEPERNECFLQHKDDNPNLPRLVRPEVDVMCTAFHDNEETFLKKYLYEIARRHPYFYAPELLFFAKRYKAAFTECCQAADKAACLLPKLDELRDEGKASSAKQRLKCASLQKFGERAFKAWAVARLSQRFPKAEFAEVSKLVTDLTKVHTECCHGDLLECADDRADLAKYICENQDSISSKLKECCEKPLLEKSHCIAEVENDEMPADLPSLAADFVESKDVCKNYAEAKDVFLGMFLYEYARRHPDYSVVLLLRLAKTYETTLEKCCAAADPHECYAKVFDEFKPLVEEPQNLIKQNCELFEQLGEYKFQNALLVRYTKKVPQVSTPTLVEVSRNLGKVGSKCCKHPEAKRMPCAEDYLSVVLNQLCVLHEKTPVSDRVTKCCTESLVNRRPCFSALEVDETYVPKEFNAETFTFHADICTLSEKERQIKKQTALVELVKHKPKATKEQLKAVMDDFAAFVEKCCKADDKETCFAEEGKKLVAASQAALGLHHHHHH

SEQ ID NO: 2267 - protein, 1093 aa, synthetic construct
QVQLQESGPGLVKPSETLSLTCTVSGGSISSYYWSWIRQPPGKGLEWIGYIYYSGRTNYYPSLKSRVTISIDTSKNQFSLKLSSVTAADTAVYYCARIAVAGFFFDYWGQGTLVTVSSGGGGSGGGGSGGGGSEIVLTQSPGTLSLSPGERATLSCRASQSVNKNYLAWYQQKPGQAPRLLIYGASSRATGIPDRFSGSGSGTDFTLTISRLEPEDFAVYYCQQYDRSPLTFGGGTKLEIKSGGGGSEVQLVESGGGLVQPGGSLRLSCAASGFTFNSYAMNWVRQAPGKGLEWVARIRSKYNNYATYYADSVKGRFTISRDDSKNTAYLQMNSLKTEDTAVYYCVRHGNFGNSYVSWWAYWGQGTLVTVSSGGGGSGGGGSGGGGSQTVVTQEPSLTVSPGGTVTLTCGSSTGAVTSGNYPNWVQQKPGQAPRGLIGGTKFLAPGTPARFSGSLLGGKAALTLSGVQPEDEAEYYCVLWYSNRWVFGGGTKLTVLPGGGGSDAHKSEVAHRFKDLGEENFKALVLIAFAQYLQQCPFEDHVKLVNEVTEFAKTCVADESAENCDKSLHTLFGDKLCTVATLRETYGEMADCCAKQEPERNECFLQHKDDNPNLPRLVRPEVDVMCTAFHDNEETFLKKYLYEIARRHPYFYAPELLFFAKRYKAAFTECCQAADKAACLLPKLDELRDEGKASSAKQRLKCASLQKFGERAFKAWAVARLSQRFPKAEFAEVSKLVTDLTKVHTECCHGDLLECADDRADLAKYICENQDSISSKLKECCEKPLLEKSHCIAEVENDEMPADLPSLAADFVESKDVCKNYAEAKDVFLGMFLYEYARRHPDYSVVLLLRLAKTYETTLEKCCAAADPHECYAKVFDEFKPLVEEPQNLIKQNCELFEQLGEYKFQNALLVRYTKKVPQVSTPTLVEVSRNLGKVGSKCCKHPEAKRMPCAEDYLSVVLNQLCVLHEKTPVSDRVTKCCTESLVNRRPCFSALEVDETYVPKEFNAETFTFHADICTLSEKERQIKKQTALVELVKHKPKATKEQLKAVMDDFAAFVEKCCKADDKETCFAEEGKKLVAASQAALGLHHHHHH

SEQ ID NO: 2268 - protein, 1093 aa, synthetic construct
QVQLQESGPGLVKPSETLSLTCTVSGASISSFYWSWIRQPPGKGLEWIGYIYYSGTTNYNPSLKSRVTISVDTSKNQFSLKLSSVTAADTAVYYCARIAVAGFFFDYWGQGTLVTVSSGGGGSGGGGSGGGGSEIVLTQSPGTLSLSPGERATLSCRASQSVNKNYLAWYQQKPGQAPRLLIYGASSRATGIPDRFSGSGSGTDFTLTISRLEPEDFAVYYCQQYDRSPLTFGGGTKVEIKSGGGGSEVQLVESGGGLVQPGGSLRLSCAASGFTFNSYAMNWVRQAPGKGLEWVARIRSKYNNYATYYADSVKGRFTISRDDSKNTAYLQMNSLKTEDTAVYYCVRHGNFGNSYVSWWAYWGQGTLVTVSSGGGGSGGGGSGGGGSQTVVTQEPSLTVSPGGTVTLTCGSSTGAVTSGNYPNWVQQKPGQAPRGLIGGTKFLAPGTPARFSGSLLGGKAALTLSGVQPEDEAEYYCVLWYSNRWVFGGGTKLTVLPGGGGSDAHKSEVAHRFKDLGEENFKALVLIAFAQYLQQCPFEDHVKLVNEVTEFAKTCVADESAENCDKSLHTLFGDKLCTVATLRETYGEMADCCAKQEPERNECFLQHKDDNPNLPRLVRPEVDVMCTAFHDNEETFLKKYLYEIARRHPYFYAPELLFFAKRYKAAFTECCQAADKAACLLPKLDELRDEGKASSAKQRLKCASLQKFGERAFKAWAVARLSQRFPKAEFAEVSKLVTDLTKVHTECCHGDLLECADDRADLAKYICENQDSISSKLKECCEKPLLEKSHCIAEVENDEMPADLPSLAADFVESKDVCKNYAEAKDVFLGMFLYEYARRHPDYSVVLLLRLAKTYETTLEKCCAAADPHECYAKVFDEFKPLVEEPQNLIKQNCELFEQLGEYKFQNALLVRYTKKVPQVSTPTLVEVSRNLGKVGSKCCKHPEAKRMPCAEDYLSVVLNQLCVLHEKTPVSDRVTKCCTESLVNRRPCFSALEVDETYVPKEFNAETFTFHADICTLSEKERQIKKQTALVELVKHKPKATKEQLKAVMDDFAAFVEKCCKADDKETCFAEEGKKLVAASQAALGLHHHHHH

SEQ ID NO: 2269 - protein, 1093 aa, synthetic construct
QVQLQESGPGLVKPSQTLSLTCTVSGASISSFYWSWIRQPPGKGLEWIGYIYYSGTTNYNPSLKSRVTISVDTSKNQFSLKLSSVTAADTAVYYCARIAVAGFFFDYWGQGTLVTVSSGGGGSGGGGSGGGGSEIVLTQSPGTLSLSPGERATLSCRASQSVNKNYLAWYQQKPGQAPRLLIYGASSRATGIPDRFSGSGSGTDFTLTISRLEPEDFAVYYCQQYDRSPLTFGGGTKVEIKSGGGGSEVQLVESGGGLVQPGGSLRLSCAASGFTFNSYAMNWVRQAPGKGLEWVARIRSKYNNYATYYADSVKGRFTISRDDSKNTAYLQMNSLKTEDTAVYYCVRHGNFGNSYVSWWAYWGQGTLVTVSSGGGGSGGGGSGGGGSQTVVTQEPSLTVSPGGTVTLTCGSSTGAVTSGNYPNWVQQKPGQAPRGLIGGTKFLAPGTPARFSGSLLGGKAALTLSGVQPEDEAEYYCVLWYSNRWVFGGGTKLTVLPGGGGSDAHKSEVAHRFKDLGEENFKALVLIAFAQYLQQCPFEDHVKLVNEVTEFAKTCVADESAENCDKSLHTLFGDKLCTVATLRETYGEMADCCAKQEPERNECFLQHKDDNPNLPRLVRPEVDVMCTAFHDNEETFLKKYLYEIARRHPYFYAPELLFFAKRYKAAFTECCQAADKAACLLPKLDELRDEGKASSAKQRLKCASLQKFGERAFKAWAVARLSQRFPKAEFAEVSKLVTDLTKVHTECCHGDLLECADDRADLAKYICENQDSISSKLKECCEKPLLEKSHCIAEVENDEMPADLPSLAADFVESKDVCKNYAEAKDVFLGMFLYEYARRHPDYSVVLLLRLAKTYETTLEKCCAAADPHECYAKVFDEFKPLVEEPQNLIKQNCELFEQLGEYKFQNALLVRYTKKVPQVSTPTLVEVSRNLGKVGSKCCKHPEAKRMPCAEDYLSVVLNQLCVLHEKTPVSDRVTKCCTESLVNRRPCFSALEVDETYVPKEFNAETFTFHADICTLSEKERQIKKQTALVELVKHKPKATKEQLKAVMDDFAAFVEKCCKADDKETCFAEEGKKLVAASQAALGLHHHHHH

SEQ ID NO: 2270 - protein, 133 aa, synthetic construct; identical to SEQ ID NO: 242

SEQ ID NO: 2271 - protein, 1093 aa, synthetic construct
QVQLQESGPGLVKPSETLSLTCTVSGASISSFYWSWIRQPPGKGLEWIGYIYYSGTTNYNPSLKSRVTISVDTSKNQFSLKLSSVTAADTAVYYCARIAVAGFFFDYWGQGTLVTVSSGGGGSGGGGSGGGGSEIVLTQSPGTLSLSPGESATLSCRASQSVNKNYLAWYQQKPGQAPRLLIYGASSRATGIPDRFSGSGSGTDFTLTISRLEPEDFAVYYCQQYDRSPLTFGGGTRLEIKSGGGGSEVQLVESGGGLVQPGGSLRLSCAASGFTFNSYAMNWVRQAPGKGLEWVARIRSKYNNYATYYADSVKGRFTISRDDSKNTAYLQMNSLKTEDTAVYYCVRHGNFGNSYVSWWAYWGQGTLVTVSSGGGGSGGGGSGGGGSQTVVTQEPSLTVSPGGTVTLTCGSSTGAVTSGNYPNWVQQKPGQAPRGLIGGTKFLAPGTPARFSGSLLGGKAALTLSGVQPEDEAEYYCVLWYSNRWVFGGGTKLTVLPGGGGSDAHKSEVAHRFKDLGEENFKALVLIAFAQYLQQCPFEDHVKLVNEVTEFAKTCVADESAENCDKSLHTLFGDKLCTVATLRETYGEMADCCAKQEPERNECFLQHKDDNPNLPRLVRPEVDVMCTAFHDNEETFLKKYLYEIARRHPYFYAPELLFFAKRYKAAFTECCQAADKAACLLPKLDELRDEGKASSAKQRLKCASLQKFGERAFKAWAVARLSQRFPKAEFAEVSKLVTDLTKVHTECCHGDLLECADDRADLAKYICENQDSISSKLKECCEKPLLEKSHCIAEVENDEMPADLPSLAADFVESKDVCKNYAEAKDVFLGMFLYEYARRHPDYSVVLLLRLAKTYETTLEKCCAAADPHECYAKVFDEFKPLVEEPQNLIKQNCELFEQLGEYKFQNALLVRYTKKVPQVSTPTLVEVSRNLGKVGSKCCKHPEAKRMPCAEDYLSVVLNQLCVLHEKTPVSDRVTKCCTESLVNRRPCFSALEVDETYVPKEFNAETFTFHADICTLSEKERQIKKQTALVELVKHKPKATKEQLKAVMDDFAAFVEKCCKADDKETCFAEEGKKLVAASQAALGLHHHHHH

SEQ ID NO: 2272 - protein, 1093 aa, synthetic construct
QVQLQESGPGLVKPSQTLSLTCTVSGGSISSYYWSWIRQPPGKGLEWIGYIFYNGITNYNPSLKSRVTISLDTSKNQFSLKLSSVTAADTAKYYCARIHSGSFSFDYWDQGTLVTVSSGGGGSGGGGSGGGGSEIVMTQSPGTLSLSPGERATLSCRASQSVSRGYLAWYQQKPGQAPRLLIYGASSRATDIPDRFSGSGSGTDFTLTISRLEPEDFAVYYCQQYDTSPITFGQGTKVEIKSGGGGSEVQLVESGGGLVQPGGSLRLSCAASGFTFNSYAMNWVRQAPGKGLEWVARIRSKYNNYATYYADSVKGRFTISRDDSKNTAYLQMNSLKTEDTAVYYCVRHGNFGNSYVSWWAYWGQGTLVTVSSGGGGSGGGGSGGGGSQTVVTQEPSLTVSPGGTVTLTCGSSTGAVTSGNYPNWVQQKPGQAPRGLIGGTKFLAPGTPARFSGSLLGGKAALTLSGVQPEDEAEYYCVLWYSNRWVFGGGTKLTVLPGGGGSDAHKSEVAHRFKDLGEENFKALVLIAFAQYLQQCPFEDHVKLVNEVTEFAKTCVADESAENCDKSLHTLFGDKLCTVATLRETYGEMADCCAKQEPERNECFLQHKDDNPNLPRLVRPEVDVMCTAFHDNEETFLKKYLYEIARRHPYFYAPELLFFAKRYKAAFTECCQAADKAACLLPKLDELRDEGKASSAKQRLKCASLQKFGERAFKAWAVARLSQRFPKAEFAEVSKLVTDLTKVHTECCHGDLLECADDRADLAKYICENQDSISSKLKECCEKPLLEKSHCIAEVENDEMPADLPSLAADFVESKDVCKNYAEAKDVFLGMFLYEYARRHPDYSVVLLLRLAKTYETTLEKCCAAADPHECYAKVFDEFKPLVEEPQNLIKQNCELFEQLGEYKFQNALLVRYTKKVPQVSTPTLVEVSRNLGKVGSKCCKHPEAKRMPCAEDYLSVVLNQLCVLHEKTPVSDRVTKCCTESLVNRRPCFSALEVDETYVPKEFNAETFTFHADICTLSEKERQIKKQTALVELVKHKPKATKEQLKAVMDDFAAFVEKCCKADDKETCFAEEGKKLVAASQAALGLHHHHHH

SEQ ID NO: 2273 - protein, 1102 aa, synthetic construct
QVQLVQSGAEVKKPGASVKVSCKASGYTFTSYYMHWVRQAPGQGLEWMGIINPSDGSTNYAQNFQGRVTMTRDTSTNTVYMELSSLRSEDTAVYYCARGGNSAFYSYYDMDVWGQGTTVTVSSGGGGSGGGGSGGGGSDVVMTQSPLSLPVTLGQPASISCRSSQSLVYRDGNTYLSWFQQRPGQSPRRLIYKVSNWQSGVPDRFSGSGSGTDFTLKISRVEAEDVGVYFCMQGTHWPPTFGQGTKVEIKSGGGGSEVQLVESGGGLVQPGGSLRLSCAASGFTFNSYAMNWVRQAPGKGLEWVARIRSKYNNYATYYADSVKGRFTISRDDSKNTAYLQMNSLKTEDTAVYYCVRHGNFGNSYVSWWAYWGQGTLVTVSSGGGGSGGGGSGGGGSQTVVTQEPSLTVSPGGTVTLTCGSSTGAVTSGNYPNWVQQKPGQAPRGLIGGTKFLAPGTPARFSGSLLGGKAALTLSGVQPEDEAEYYCVLWYSNRWVFGGGTKLTVLPGGGGSDAHKSEVAHRFKDLGEENFKALVLIAFAQYLQQCPFEDHVKLVNEVTEFAKTCVADESAENCDKSLHTLFGDKLCTVATLRETYGEMADCCAKQEPERNECFLQHKDDNPNLPRLVRPEVDVMCTAFHDNEETFLKKYLYEIARRHPYFYAPELLFFAKRYKAAFTECCQAADKAACLLPKLDELRDEGKASSAKQRLKCASLQKFGERAFKAWAVARLSQRFPKAEFAEVSKLVTDLTKVHTECCHGDLLECADDRADLAKYICENQDSISSKLKECCEKPLLEKSHCIAEVENDEMPADLPSLAADFVESKDVCKNYAEAKDVFLGMFLYEYARRHPDYSVVLLLRLAKTYETTLEKCCAAADPHECYAKVFDEFKPLVEEPQNLIKQNCELFEQLGEYKFQNALLVRYTKKVPQVSTPTLVEVSRNLGKVGSKCCKHPEAKRMPCAEDYLSVVLNQLCVLHEKTPVSDRVTKCCTESLVNRRPCFSALEVDETYVPKEFNAETFTFHADICTLSEKERQIKKQTALVELVKHKPKATKEQLKAVMDDFAAFVEKCCKADDKETCFAEEGKKLVAASQAALGLHHHHHH

SEQ ID NO: 2274 - protein, 1102 aa, synthetic construct
QVQLVQSGAEVKKPGASVKVSCKASGYTFTNYYMHWVRQAPGLGLEWMGIINPSDGSTSYAQKFQGRVTMTRDTSTNTVYMDLSSLRSEDTAVYYCARGGNSAFYSYYDMDVWGQGTTVTVSSGGGGSGGGGSGGGGSDVVMTQTPLSLPVTLGQPASISCRSSQSLVYRDGNTYLSWFQQRPGQSPRRLIYKVSNWQSGVPDRFSGGGSGTDFTLKISRVEAEDVGVYYCMQGTHWPPTFGQGTKVEIKSGGGGSEVQLVESGGGLVQPGGSLRLSCAASGFTFNSYAMNWVRQAPGKGLEWVARIRSKYNNYATYYADSVKGRFTISRDDSKNTAYLQMNSLKTEDTAVYYCVRHGNFGNSYVSWWAYWGQGTLVTVSSGGGGSGGGGSGGGGSQTVVTQEPSLTVSPGGTVTLTCGSSTGAVTSGNYPNWVQQKPGQAPRGLIGGTKFLAPGTPARFSGSLLGGKAALTLSGVQPEDEAEYYCVLWYSNRWVFGGGTKLTVLPGGGGSDAHKSEVAHRFKDLGEENFKALVLIAFAQYLQQCPFEDHVKLVNEVTEFAKTCVADESAENCDKSLHTLFGDKLCTVATLRETYGEMADCCAKQEPERNECFLQHKDDNPNLPRLVRPEVDVMCTAFHDNEETFLKKYLYEIARRHPYFYAPELLFFAKRYKAAFTECCQAADKAACLLPKLDELRDEGKASSAKQRLKCASLQKFGERAFKAWAVARLSQRFPKAEFAEVSKLVTDLTKVHTECCHGDLLECADDRADLAKYICENQDSISSKLKECCEKPLLEKSHCIAEVENDEMPADLPSLAADFVESKDVCKNYAEAKDVFLGMFLYEYARRHPDYSVVLLLRLAKTYETTLEKCCAAADPHECYAKVFDEFKPLVEEPQNLIKQNCELFEQLGEYKFQNALLVRYTKKVPQVSTPTLVEVSRNLGKVGSKCCKHPEAKRMPCAEDYLSVVLNQLCVLHEKTPVSDRVTKCCTESLVNRRPCFSALEVDETYVPKEFNAETFTFHADICTLSEKERQIKKQTALVELVKHKPKATKEQLKAVMDDFAAFVEKCCKADDKETCFAEEGKKLVAASQAALGLHHHHHH

SEQ ID NO: 2275 - protein, 1102 aa, synthetic construct
QVQLVQSGAEVKKPGASVKVSCKASGYTFTGYYIHWVRQAPGQGLEWMGIINPSDGSTSYGQNFQGRVTMTRDTSTNTVYMELSSLRSEDTAVYYCARGGNSAFYSYYDMDVWGQGTTVTVSSGGGGSGGGGSGGGGSDVVMTQSPLSLPVTLGQPASISCRSSQSLAYRDGNTYLSWFQQRPGQSPRRLIYKVSNWQSGVPDRFSGSGSGTDFTLKISRVEAEDVGVYFCMQGTHWPPTFGQGTKVEIKSGGGGSEVQLVESGGGLVQPGGSLRLSCAASGFTFNSYAMNWVRQAPGKGLEWVARIRSKYNNYATYYADSVKGRFTISRDDSKNTAYLQMNSLKTEDTAVYYCVRHGNFGNSYVSWWAYWGQGTLVTVSSGGGGSGGGGSGGGGSQTVVTQEPSLTVSPGGTVTLTCGSSTGAVTSGNYPNWVQQKPGQAPRGLIGGTKFLAPGTPARFSGSLLGGKAALTLSGVQPEDEAEYYCVLWYSNRWVFGGGTKLTVLPGGGGSDAHKSEVAHRFKDLGEENFKALVLIAFAQYLQQCPFEDHVKLVNEVTEFAKTCVADESAENCDKSLHTLFGDKLCTVATLRETYGEMADCCAKQEPERNECFLQHKDDNPNLPRLVRPEVDVMCTAFHDNEETFLKKYLYEIARRHPYFYAPELLFFAKRYKAAFTECCQAADKAACLLPKLDELRDEGKASSAKQRLKCASLQKFGERAFKAWAVARLSQRFPKAEFAEVSKLVTDLTKVHTECCHGDLLECADDRADLAKYICENQDSISSKLKECCEKPLLEKSHCIAEVENDEMPADLPSLAADFVESKDVCKNYAEAKDVFLGMFLYEYARRHPDYSVVLLLRLAKTYETTLEKCCAAADPHECYAKVFDEFKPLVEEPQNLIKQNCELFEQLGEYKFQNALLVRYTKKVPQVSTPTLVEVSRNLGKVGSKCCKHPEAKRMPCAEDYLSVVLNQLCVLHEKTPVSDRVTKCCTESLVNRRPCFSALEVDETYVPKEFNAETFTFHADICTLSEKERQIKKQTALVELVKHKPKATKEQLKAVMDDFAAFVEKCCKADDKETCFAEEGKKLVAASQAALGLHHHHHH

SEQ ID NO: 2276 - protein, 1093 aa, synthetic construct; identical to SEQ ID NO: 2266

SEQ ID NO: 2277 - protein, 496 aa, synthetic construct
QVQLQESGPGLVKPSETLSLTCTVSGGSISSYYWSWIRQPPGKCLEWIGYVYYSGTTNYNPSLKSRVTISVDTSKNQFSLKLSSVTAADTAVYYCASIAVTGFYFDYWGQGTLVTVSSGGGGSGGGGSGGGGSEIVLTQSPGTLSLSPGERVTLSCRASQRVNNNYLAWYQQRPGQAPRLLIYGASSRATGIPDRFSGSGSGTDFTLTISRLEPEDFAVYYCQQYDRSPLTFGCGTKLEIKSGGGGSEVQLVESGGGLVQPGGSLKLSCAASGFTFNKYAMNWVRQAPGKGLEWVARIRSKYNNYATYYADSVKDRFTISRDDSKNTAYLQMNNLKTEDTAVYYCVRHGNFGNSYISYWAYWGQGTLVTVSSGGGGSGGGGSGGGGSQTVVTQEPSLTVSPGGTVTLTCGSSTGAVTSGNYPNWVQQKPGQAPRGLIGGTKFLAPGTPARFSGSLLGGKAALTLSGVQPEDEAEYYCVLWYSNRWVFGGGTKLTVL

SEQ ID NO: 2278 - protein, 505 aa, synthetic construct
QVQLVQSGAEVKKPGASVKVSCKASGYTFTNYYMHWVRQAPGLGLEWMGIINPSDGSTSYAQKFQGRVTMTRDTSTNTVYMDLSSLRSEDTAVYYCARGGNSAFYSYYDMDVWGQGTTVTVSSGGGGSGGGGSGGGGSDVVMTQTPLSLPVTLGQPASISCRSSQSLVYREGNTYLSWFQQRPGQSPRRLIYKVSNWQSGVPDRFSGGGSGTDFTLKISRVEAEDVGVYYCMQGTHWPPTFGQGTKVEIKSGGGGSEVQLVESGGGLVQPGGSLKLSCAASGFTFNKYAMNWVRQAPGKGLEWVARIRSKYNNYATYYADSVKDRFTISRDDSKNTAYLQMNNLKTEDTAVYYCVRHGNFGNSYISYWAYWGQGTLVTVSSGGGGSGGGGSGGGGSQTVVTQEPSLTVSPGGTVTLTCGSSTGAVTSGNYPNWVQQKPGQAPRGLIGGTKFLAPGTPARFSGSLLGGKAALTLSGVQPEDEAEYYCVLWYSNRWVFGGGTKLTVL

SEQ ID NO: 2279 - protein, 505 aa, synthetic construct
QVQLVQSGAEVKKPGASVKVSCKASGYTFTNYYMHWVRQAPGLGLEWMGIINPSDGSTSYAQKFQGRVTMTRDTSTNTVYMDLSSLRSEDTAVYYCARGGNSAFYSYYDMDVWGQGTTVTVSSGGGGSGGGGSGGGGSDVVMTQTPLSLPVTLGQPASISCRSSQSLVYRDANTYLSWFQQRPGQSPRRLIYKVSNWQSGVPDRFSGGGSGTDFTLKISRVEAEDVGVYYCMQGTHWPPTFGQGTKVEIKSGGGGSEVQLVESGGGLVQPGGSLKLSCAASGFTFNKYAMNWVRQAPGKGLEWVARIRSKYNNYATYYADSVKDRFTISRDDSKNTAYLQMNNLKTEDTAVYYCVRHGNFGNSYISYWAYWGQGTLVTVSSGGGGSGGGGSGGGGSQTVVTQEPSLTVSPGGTVTLTCGSSTGAVTSGNYPNWVQQKPGQAPRGLIGGTKFLAPGTPARFSGSLLGGKAALTLSGVQPEDEAEYYCVLWYSNRWVFGGGTKLTVL

SEQ ID NO: 2280 - protein, 133 aa, synthetic construct
APASSSTKKTQLQLEHLLLDLQMILNGINNYKNPKLTRMLTAKFAMPKKATELKHLQCLEEELKPLEEVLNGAQSKNFHLRPRDLISNINVIVLELKGSETTFMCEYADETATIVEFLNRWITFAQSIISTLT

SEQ ID NO: 2281 - protein, 505 aa, synthetic construct
QVQLVQSGAEVKKPGASVKVSCKASGYTFTNYYMHWVRQAPGLGLEWMGIINPSDGSTSYAQKFQGRVTMTRDTSTNTVYMDLSSLRSEDTAVYYCARGGNSAFYSYYDMDVWGQGTTVTVSSGGGGSGGGGSGGGGSDVVMTQTPLSLPVTLGQPASISCRSSQSLVYRDGNAYLSWFQQRPGQSPRRLIYKVSNWQSGVPDRFSGGGSGTDFTLKISRVEAEDVGVYYCMQGTHWPPTFGQGTKVEIKSGGGGSEVQLVESGGGLVQPGGSLKLSCAASGFTFNKYAMNWVRQAPGKGLEWVARIRSKYNNYATYYADSVKDRFTISRDDSKNTAYLQMNNLKTEDTAVYYCVRHGNFGNSYISYWAYWGQGTLVTVSSGGGGSGGGGSGGGGSQTVVTQEPSLTVSPGGTVTLTCGSSTGAVTSGNYPNWVQQKPGQAPRGLIGGTKFLAPGTPARFSGSLLGGKAALTLSGVQPEDEAEYYCVLWYSNRWVFGGGTKLTVL

SEQ ID NO: 2282 - protein, 505 aa, synthetic construct
QVQLVQSGAEVKKPGASVKVSCKASGYTFTNYYMHWVRQAPGLGLEWMGIINPSDGSTSYAQKFQGRVTMTRDTSTNTVYMDLSSLRSEDTAVYYCARGGNSAFYSYYDMDVWGQGTTVTVSSGGGGSGGGGSGGGGSDVVMTQTPLSLPVTLGQPASISCRSSQSLVYRDGNTYLSWFQQRPGQSPRRLIYKVSNWQSGVPDRFSGSGSGTDFTLKISRVEAEDVGVYYCMQGTHWPPTFGQGTKVEIKSGGGGSEVQLVESGGGLVQPGGSLKLSCAASGFTFNKYAMNWVRQAPGKGLEWVARIRSKYNNYATYYADSVKDRFTISRDDSKNTAYLQMNNLKTEDTAVYYCVRHGNFGNSYISYWAYWGQGTLVTVSSGGGGSGGGGSGGGGSQTVVTQEPSLTVSPGGTVTLTCGSSTGAVTSGNYPNWVQQKPGQAPRGLIGGTKFLAPGTPARFSGSLLGGKAALTLSGVQPEDEAEYYCVLWYSNRWVFGGGTKLTVL

SEQ ID NO: 2283 - protein, 505 aa, synthetic construct
QVQLVQSGAEVKKPGASVKVSCKASGYTFTNYYMHWVRQAPGQGLEWMGIINPSDGSTSYAQKFQGRVTMTRDTSTNTVYMDLSSLRSEDTAVYYCARGGNSAFYSYYDMDVWGQGTTVTVSSGGGGSGGGGSGGGGSDVVMTQTPLSLPVTLGQPASISCRSSQSLVYRDGNTYLSWFQQRPGQSPRRLIYKVSNWQSGVPDRFSGGGSGTDFTLKISRVEAEDVGVYYCMQGTHWPPTFGQGTKVEIKSGGGGSEVQLVESGGGLVQPGGSLKLSCAASGFTFNKYAMNWVRQAPGKGLEWVARIRSKYNNYATYYADSVKDRFTISRDDSKNTAYLQMNNLKTEDTAVYYCVRHGNFGNSYISYWAYWGQGTLVTVSSGGGGSGGGGSGGGGSQTVVTQEPSLTVSPGGTVTLTCGSSTGAVTSGNYPNWVQQKPGQAPRGLIGGTKFLAPGTPARFSGSLLGGKAALTLSGVQPEDEAEYYCVLWYSNRWVFGGGTKLTVL

SEQ ID NO: 2284 - protein, 505 aa, synthetic construct
QVQLVQSGAEVKKPGASVKVSCKASGYTFTNYYMHWVRQAPGLGLEWMGIINPSEGSTSYAQKFQGRVTMTRDTSTNTVYMDLSSLRSEDTAVYYCARGGNSAFYSYYDMDVWGQGTTVTVSSGGGGSGGGGSGGGGSDVVMTQTPLSLPVTLGQPASISCRSSQSLVYRDGNTYLSWFQQRPGQSPRRLIYKVSNWQSGVPDRFSGGGSGTDFTLKISRVEAEDVGVYYCMQGTHWPPTFGQGTKVEIKSGGGGSEVQLVESGGGLVQPGGSLKLSCAASGFTFNKYAMNWVRQAPGKGLEWVARIRSKYNNYATYYADSVKDRFTISRDDSKNTAYLQMNNLKTEDTAVYYCVRHGNFGNSYISYWAYWGQGTLVTVSSGGGGSGGGGSGGGGSQTVVTQEPSLTVSPGGTVTLTCGSSTGAVTSGNYPNWVQQKPGQAPRGLIGGTKFLAPGTPARFSGSLLGGKAALTLSGVQPEDEAEYYCVLWYSNRWVFGGGTKLTVL

SEQ ID NO: 2285 - protein, 505 aa, synthetic construct
QVQLVQSGAEVKKPGASVKVSCKASGYTFTNYYMHWVRQAPGLGLEWMGIINPSDASTSYAQKFQGRVTMTRDTSTNTVYMDLSSLRSEDTAVYYCARGGNSAFYSYYDMDVWGQGTTVTVSSGGGGSGGGGSGGGGSDVVMTQTPLSLPVTLGQPASISCRSSQSLVYRDGNTYLSWFQQRPGQSPRRLIYKVSNWQSGVPDRFSGGGSGTDFTLKISRVEAEDVGVYYCMQGTHWPPTFGQGTKVEIKSGGGGSEVQLVESGGGLVQPGGSLKLSCAASGFTFNKYAMNWVRQAPGKGLEWVARIRSKYNNYATYYADSVKDRFTISRDDSKNTAYLQMNNLKTEDTAVYYCVRHGNFGNSYISYWAYWGQGTLVTVSSGGGGSGGGGSGGGGSQTVVTQEPSLTVSPGGTVTLTCGSSTGAVTSGNYPNWVQQKPGQAPRGLIGGTKFLAPGTPARFSGSLLGGKAALTLSGVQPEDEAEYYCVLWYSNRWVFGGGTKLTVL

SEQ ID NO: 2286 - protein, 505 aa, synthetic construct
QVQLVQSGAEVKKPGASVKVSCKASGYTFTNYYMHWVRQAPGQGLEWMGIINPSDGSTSYAQKFQGRVTMTRDTSTNTVYMDLSSLRSEDTAVYYCARGGNSAFYSYYDMDVWGQGTTVTVSSGGGGSGGGGSGGGGSDVVMTQTPLSLPVTLGQPASISCRSSQSLVYRDGNTYLSWFQQRPGQSPRRLIYKVSNWQSGVPDRFSGSGSGTDFTLKISRVEAEDVGVYYCMQGTHWPPTFGQGTKVEIKSGGGGSEVQLVESGGGLVQPGGSLKLSCAASGFTFNKYAMNWVRQAPGKGLEWVARIRSKYNNYATYYADSVKDRFTISRDDSKNTAYLQMNNLKTEDTAVYYCVRHGNFGNSYISYWAYWGQGTLVTVSSGGGGSGGGGSGGGGSQTVVTQEPSLTVSPGGTVTLTCGSSTGAVTSGNYPNWVQQKPGQAPRGLIGGTKFLAPGTPARFSGSLLGGKAALTLSGVQPEDEAEYYCVLWYSNRWVFGGGTKLTVL

SEQ ID NO: 2287 - protein, 505 aa, synthetic construct
QVQLVQSGAEVKKPGASVKVSCKASGYTFTNYYMHWVRQAPGQGLEWMGIINPSEGSTSYAQKFQGRVTMTRDTSTNTVYMDLSSLRSEDTAVYYCARGGNSAFYSYYDMDVWGQGTTVTVSSGGGGSGGGGSGGGGSDVVMTQTPLSLPVTLGQPASISCRSSQSLVYREGNTYLSWFQQRPGQSPRRLIYKVSNWQSGVPDRFSGSGSGTDFTLKISRVEAEDVGVYYCMQGTHWPPTFGQGTKVEIKSGGGGSEVQLVESGGGLVQPGGSLKLSCAASGFTFNKYAMNWVRQAPGKGLEWVARIRSKYNNYATYYADSVKDRFTISRDDSKNTAYLQMNNLKTEDTAVYYCVRHGNFGNSYISYWAYWGQGTLVTVSSGGGGSGGGGSGGGGSQTVVTQEPSLTVSPGGTVTLTCGSSTGAVTSGNYPNWVQQKPGQAPRGLIGGTKFLAPGTPARFSGSLLGGKAALTLSGVQPEDEAEYYCVLWYSNRWVFGGGTKLTVL

SEQ ID NO: 2288 - protein, 505 aa, synthetic construct
QVQLVQSGAEVKKPGASVKVSCKASGYTFTNYYMHWVRQAPGQGLEWMGIINPSDASTSYAQKFQGRVTMTRDTSTNTVYMDLSSLRSEDTAVYYCARGGNSAFYSYYDMDVWGQGTTVTVSSGGGGSGGGGSGGGGSDVVMTQTPLSLPVTLGQPASISCRSSQSLVYRDANTYLSWFQQRPGQSPRRLIYKVSNWQSGVPDRFSGSGSGTDFTLKISRVEAEDVGVYYCMQGTHWPPTFGQGTKVEIKSGGGGSEVQLVESGGGLVQPGGSLKLSCAASGFTFNKYAMNWVRQAPGKGLEWVARIRSKYNNYATYYADSVKDRFTISRDDSKNTAYLQMNNLKTEDTAVYYCVRHGNFGNSYISYWAYWGQGTLVTVSSGGGGSGGGGSGGGGSQTVVTQEPSLTVSPGGTVTLTCGSSTGAVTSGNYPNWVQQKPGQAPRGLIGGTKFLAPGTPARFSGSLLGGKAALTLSGVQPEDEAEYYCVLWYSNRWVFGGGTKLTVL

SEQ ID NO: 2289 - protein, 505 aa, synthetic construct
QVQLVQSGAEVKKPGASVKVSCKASGYTFTNYYMHWVRQAPGLCLEWMGIINPSDGSTSYAQKFQGRVTMTRDTSTNTVYMDLSSLRSEDTAVYYCARGGNSAFYSYYDMDVWGQGTTVTVSSGGGGSGGGGSGGGGSDVVMTQTPLSLPVTLGQPASISCRSSQSLVYRDGNTYLSWFQQRPGQSPRRLIYKVSNWQSGVPDRFSGGGSGTDFTLKISRVEAEDVGVYYCMQGTHWPPTFGCGTKVEIKSGGGGSEVQLVESGGGLVQPGGSLKLSCAASGFTFNKYAMNWVRQAPGKGLEWVARIRSKYNNYATYYADSVKDRFTISRDDSKNTAYLQMNNLKTEDTAVYYCVRHGNFGNSYISYWAYWGQGTLVTVSSGGGGSGGGGSGGGGSQTVVTQEPSLTVSPGGTVTLTCGSSTGAVTSGNYPNWVQQKPGQAPRGLIGGTKFLAPGTPARFSGSLLGGKAALTLSGVQPEDEAEYYCVLWYSNRWVFGGGTKLTVL

SEQ ID NO: 2290 - protein, 518 aa, synthetic construct; identical to SEQ ID NO: 276

SEQ ID NO: 2291 - protein, 505 aa, synthetic construct
QVQLVQSGAEVKKPGASVKVSCKASGYTFTNYYMHWVRQAPGLCLEWMGIINPSDGSTSYAQKFQGRVTMTRDTSTNTVYMDLSSLRSEDTAVYYCARGGNSAFYSYYDMDVWGQGTTVTVSSGGGGSGGGGSGGGGSDVVMTQTPLSLPVTLGQPASISCRSSQSLVYRDANTYLSWFQQRPGQSPRRLIYKVSNWQSGVPDRFSGGGSGTDFTLKISRVEAEDVGVYYCMQGTHWPPTFGCGTKVEIKSGGGGSEVQLVESGGGLVQPGGSLKLSCAASGFTFNKYAMNWVRQAPGKGLEWVARIRSKYNNYATYYADSVKDRFTISRDDSKNTAYLQMNNLKTEDTAVYYCVRHGNFGNSYISYWAYWGQGTLVTVSSGGGGSGGGGSGGGGSQTVVTQEPSLTVSPGGTVTLTCGSSTGAVTSGNYPNWVQQKPGQAPRGLIGGTKFLAPGTPARFSGSLLGGKAALTLSGVQPEDEAEYYCVLWYSNRWVFGGGTKLTVL

SEQ ID NO: 2292 - protein, 505 aa, synthetic construct
QVQLVQSGAEVKKPGASVKVSCKASGYTFTNYYMHWVRQAPGLCLEWMGIINPSDGSTSYAQKFQGRVTMTRDTSTNTVYMDLSSLRSEDTAVYYCARGGNSAFYSYYDMDVWGQGTTVTVSSGGGGSGGGGSGGGGSDVVMTQTPLSLPVTLGQPASISCRSSQSLVYRDGQTYLSWFQQRPGQSPRRLIYKVSNWQSGVPDRFSGGGSGTDFTLKISRVEAEDVGVYYCMQGTHWPPTFGCGTKVEIKSGGGGSEVQLVESGGGLVQPGGSLKLSCAASGFTFNKYAMNWVRQAPGKGLEWVARIRSKYNNYATYYADSVKDRFTISRDDSKNTAYLQMNNLKTEDTAVYYCVRHGNFGNSYISYWAYWGQGTLVTVSSGGGGSGGGGSGGGGSQTVVTQEPSLTVSPGGTVTLTCGSSTGAVTSGNYPNWVQQKPGQAPRGLIGGTKFLAPGTPARFSGSLLGGKAALTLSGVQPEDEAEYYCVLWYSNRWVFGGGTKLTVL

SEQ ID NO: 2293 - protein, 505 aa, synthetic construct
QVQLVQSGAEVKKPGASVKVSCKASGYTFTNYYMHWVRQAPGLCLEWMGIINPSDGSTSYAQKFQGRVTMTRDTSTNTVYMDLSSLRSEDTAVYYCARGGNSAFYSYYDMDVWGQGTTVTVSSGGGGSGGGGSGGGGSDVVMTQTPLSLPVTLGQPASISCRSSQSLVYRDGNAYLSWFQQRPGQSPRRLIYKVSNWQSGVPDRFSGGGSGTDFTLKISRVEAEDVGVYYCMQGTHWPPTFGCGTKVEIKSGGGGSEVQLVESGGGLVQPGGSLKLSCAASGFTFNKYAMNWVRQAPGKGLEWVARIRSKYNNYATYYADSVKDRFTISRDDSKNTAYLQMNNLKTEDTAVYYCVRHGNFGNSYISYWAYWGQGTLVTVSSGGGGSGGGGSGGGGSQTVVTQEPSLTVSPGGTVTLTCGSSTGAVTSGNYPNWVQQKPGQAPRGLIGGTKFLAPGTPARFSGSLLGGKAALTLSGVQPEDEAEYYCVLWYSNRWVFGGGTKLTVL

SEQ ID NO: 2294 - protein, 505 aa, synthetic construct
QVQLVQSGAEVKKPGASVKVSCKASGYTFTNYYMHWVRQAPGLCLEWMGIINPSDGSTSYAQKFQGRVTMTRDTSTNTVYMDLSSLRSEDTAVYYCARGGNSAFYSYYDMDVWGQGTTVTVSSGGGGSGGGGSGGGGSDVVMTQTPLSLPVTLGQPASISCRSSQSLVYRDGNTYLSWFQQRPGQSPRRLIYKVSNWQSGVPDRFSGSGSGTDFTLKISRVEAEDVGVYYCMQGTHWPPTFGCGTKVEIKSGGGGSEVQLVESGGGLVQPGGSLKLSCAASGFTFNKYAMNWVRQAPGKGLEWVARIRSKYNNYATYYADSVKDRFTISRDDSKNTAYLQMNNLKTEDTAVYYCVRHGNFGNSYISYWAYWGQGTLVTVSSGGGGSGGGGSGGGGSQTVVTQEPSLTVSPGGTVTLTCGSSTGAVTSGNYPNWVQQKPGQAPRGLIGGTKFLAPGTPARFSGSLLGGKAALTLSGVQPEDEAEYYCVLWYSNRWVFGGGTKLTVL

SEQ ID NO: 2295 - protein, 505 aa, synthetic construct
QVQLVQSGAEVKKPGASVKVSCKASGYTFTNYYMHWVRQAPGQCLEWMGIINPSDGSTSYAQKFQGRVTMTRDTSTNTVYMDLSSLRSEDTAVYYCARGGNSAFYSYYDMDVWGQGTTVTVSSGGGGSGGGGSGGGGSDVVMTQTPLSLPVTLGQPASISCRSSQSLVYRDGNTYLSWFQQRPGQSPRRLIYKVSNWQSGVPDRFSGGGSGTDFTLKISRVEAEDVGVYYCMQGTHWPPTFGCGTKVEIKSGGGGSEVQLVESGGGLVQPGGSLKLSCAASGFTFNKYAMNWVRQAPGKGLEWVARIRSKYNNYATYYADSVKDRFTISRDDSKNTAYLQMNNLKTEDTAVYYCVRHGNFGNSYISYWAYWGQGTLVTVSSGGGGSGGGGSGGGGSQTVVTQEPSLTVSPGGTVTLTCGSSTGAVTSGNYPNWVQQKPGQAPRGLIGGTKFLAPGTPARFSGSLLGGKAALTLSGVQPEDEAEYYCVLWYSNRWVFGGGTKLTVL

SEQ ID NO: 2296 - protein, 505 aa, synthetic construct
QVQLVQSGAEVKKPGASVKVSCKASGYTFTNYYMHWVRQAPGLCLEWMGIINPSEGSTSYAQKFQGRVTMTRDTSTNTVYMDLSSLRSEDTAVYYCARGGNSAFYSYYDMDVWGQGTTVTVSSGGGGSGGGGSGGGGSDVVMTQTPLSLPVTLGQPASISCRSSQSLVYRDGNTYLSWFQQRPGQSPRRLIYKVSNWQSGVPDRFSGGGSGTDFTLKISRVEAEDVGVYYCMQGTHWPPTFGCGTKVEIKSGGGGSEVQLVESGGGLVQPGGSLKLSCAASGFTFNKYAMNWVRQAPGKGLEWVARIRSKYNNYATYYADSVKDRFTISRDDSKNTAYLQMNNLKTEDTAVYYCVRHGNFGNSYISYWAYWGQGTLVTVSSGGGGSGGGGSGGGGSQTVVTQEPSLTVSPGGTVTLTCGSSTGAVTSGNYPNWVQQKPGQAPRGLIGGTKFLAPGTPARFSGSLLGGKAALTLSGVQPEDEAEYYCVLWYSNRWVFGGGTKLTVL

SEQ ID NO: 2297 - protein, 505 aa, synthetic construct
QVQLVQSGAEVKKPGASVKVSCKASGYTFTNYYMHWVRQAPGLCLEWMGIINPSDASTSYAQKFQGRVTMTRDTSTNTVYMDLSSLRSEDTAVYYCARGGNSAFYSYYDMDVWGQGTTVTVSSGGGGSGGGGSGGGGSDVVMTQTPLSLPVTLGQPASISCRSSQSLVYRDGNTYLSWFQQRPGQSPRRLIYKVSNWQSGVPDRFSGGGSGTDFTLKISRVEAEDVGVYYCMQGTHWPPTFGCGTKVEIKSGGGGSEVQLVESGGGLVQPGGSLKLSCAASGFTFNKYAMNWVRQAPGKGLEWVARIRSKYNNYATYYADSVKDRFTISRDDSKNTAYLQMNNLKTEDTAVYYCVRHGNFGNSYISYWAYWGQGTLVTVSSGGGGSGGGGSGGGGSQTVVTQEPSLTVSPGGTVTLTCGSSTGAVTSGNYPNWVQQKPGQAPRGLIGGTKFLAPGTPARFSGSLLGGKAALTLSGVQPEDEAEYYCVLWYSNRWVFGGGTKLTVL

SEQ ID NO: 2298 - protein, 505 aa, synthetic construct
QVQLVQSGAEVKKPGASVKVSCKASGYTFTNYYMHWVRQAPGQCLEWMGIINPSDGSTSYAQKFQGRVTMTRDTSTNTVYMDLSSLRSEDTAVYYCARGGNSAFYSYYDMDVWGQGTTVTVSSGGGGSGGGGSGGGGSDVVMTQTPLSLPVTLGQPASISCRSSQSLVYRDGNTYLSWFQQRPGQSPRRLIYKVSNWQSGVPDRFSGSGSGTDFTLKISRVEAEDVGVYYCMQGTHWPPTFGCGTKVEIKSGGGGSEVQLVESGGGLVQPGGSLKLSCAASGFTFNKYAMNWVRQAPGKGLEWVARIRSKYNNYATYYADSVKDRFTISRDDSKNTAYLQMNNLKTEDTAVYYCVRHGNFGNSYISYWAYWGQGTLVTVSSGGGGSGGGGSGGGGSQTVVTQEPSLTVSPGGTVTLTCGSSTGAVTSGNYPNWVQQKPGQAPRGLIGGTKFLAPGTPARFSGSLLGGKAALTLSGVQPEDEAEYYCVLWYSNRWVFGGGTKLTVL

SEQ ID NO: 2299 - protein, 505 aa, synthetic construct
QVQLVQSGAEVKKPGASVKVSCKASGYTFTNYYMHWVRQAPGQCLEWMGIINPSEGSTSYAQKFQGRVTMTRDTSTNTVYMDLSSLRSEDTAVYYCARGGNSAFYSYYDMDVWGQGTTVTVSSGGGGSGGGGSGGGGSDVVMTQTPLSLPVTLGQPASISCRSSQSLVYREGNTYLSWFQQRPGQSPRRLIYKVSNWQSGVPDRFSGSGSGTDFTLKISRVEAEDVGVYYCMQGTHWPPTFGCGTKVEIKSGGGGSEVQLVESGGGLVQPGGSLKLSCAASGFTFNKYAMNWVRQAPGKGLEWVARIRSKYNNYATYYADSVKDRFTISRDDSKNTAYLQMNNLKTEDTAVYYCVRHGNFGNSYISYWAYWGQGTLVTVSSGGGGSGGGGSGGGGSQTVVTQEPSLTVSPGGTVTLTCGSSTGAVTSGNYPNWVQQKPGQAPRGLIGGTKFLAPGTPARFSGSLLGGKAALTLSGVQPEDEAEYYCVLWYSNRWVFGGGTKLTVL

SEQ ID NO: 2300 - protein, 340 aa, synthetic construct
SPGQGTQSENSCTHFPGNLPNMLRDLRDAFSRVKTFFQMKDQLDNLLLKESLLEDFKGYLGCQALSEMIQFYLEEVMPQAENQDPDIKAHVNSLGENLKTLRLRLRRCHRFLPCENKSKAVEQVKNAFNKLQEKGIYKAMSEFDIFINYIEAYMTMKIRNGGGGSGGGGSGGGGSGGGGSSPGQGTQSENSCTHFPGNLPNMLRDLRDAFSRVKTFFQMKDQLDNLLLKESLLEDFKGYLGCQALSEMIQFYLEEVMPQAENQDPDIKAHVNSLGENLKTLRLRLRRCHRFLPCENKSKAVEQVKNAFNKLQEKGIYKAMSEFDIFINYIEAYMTMKIRN

SEQ ID NO: 2301 - protein, 984 aa, synthetic construct
QVQLQESGPGLVKPSETLSLTCTVSGGSISSYYWSWIRQPPGKGLEWIGYVYYSGTTNYNPSLKSRVTISVDTSKNQFSLKLSSVTAADTAVYYCASIAVTGFYFDYWGQGTLVTVSSGGGGSGGGGSGGGGSEIVLTQSPGTLSLSPGERVTLSCRASQRVNNNYLAWYQQRPGQAPRLLIYGASSRATGIPDRFSGSGSGTDFTLTISRLEPEDFAVYYCQQYDRSPLTFGGGTKLEIKSGGGGSEVQLVESGGGLVQPGGSLKLSCAASGFTFNKYAMNWVRQAPGKGLEWVARIRSKYNNYATYYADSVKDRFTISRDDSKNTAYLQMNNLKTEDTAVYYCVRHGNFGNSYISYWAYWGQGTLVTVSSGGGGSGGGGSGGGGSQTVVTQEPSLTVSPGGTVTLTCGSSTGAVTSGNYPNWVQQKPGQAPRGLIGGTKFLAPGTPARFSGSLLGGKAALTLSGVQPEDEAEYYCVLWYSNRWVFGGGTKLTVLGGGGDKTHTCPPCPAPELLGGPSVFLFPPKPKDTLMISRTPEVTCVVVDVSHEDPEVKFNWYVDGVEVHNAKTKPCEEQYGSTYRCVSVLTVLHQDWLNGKEYKCKVSNKALPAPIEKTISKAKGQPREPQVYTLPPSREEMTKNQVSLTCLVKGFYPSDIAVEWESNGQPENNYKTTPPVLDSDGSFFLYSKLTVDKSRWQQGNVFSCSVMHEALHNHYTQKSLSLSPGKGGGGSGGGGSGGGGSGGGGSGGGGSGGGGSDKTHTCPPCPAPELLGGPSVFLFPPKPKDTLMISRTPEVTCVVVDVSHEDPEVKFNWYVDGVEVHNAKTKPCEEQYGSTYRCVSVLTVLHQDWLNGKEYKCKVSNKALPAPIEKTISKAKGQPREPQVYTLPPSREEMTKNQVSLTCLVKGFYPSDIAVEWESNGQPENNYKTTPPVLDSDGSFFLYSKLTVDKSRWQQGNVFSCSVMHEALHNHYTQKSLSLSPGK

SEQ ID NO: 2302 - protein, 982 aa, synthetic construct
QVQLQESGPGLVKPSETLSLTCTVSGGSISSYYWSWIRQPPGKGLEWIGYVYYSGTTNYNPSLKSRVTISVDTSKNQFSLKLSSVTAADTAVYYCASIAVTGFYFDYWGQGTLVTVSSGGGGSGGGGSGGGGSEIVLTQSPGTLSLSPGERVTLSCRASQRVNNNYLAWYQQRPGQAPRLLIYGASSRATGIPDRFSGSGSGTDFTLTISRLEPEDFAVYYCQQYDRSPLTFGGGTKLEIKSGGGGSEVQLVESGGGLVQPGGSLKLSCAASGFTFNKYAMNWVRQAPGKGLEWVARIRSKYNNYATYYADSVKDRFTISRDDSKNTAYLQMNNLKTEDTAVYYCVRHGNFGNSYISYWAYWGQGTLVTVSSGGGGSGGGGSGGGGSQTVVTQEPSLTVSPGGTVTLTCGSSTGAVTSGNYPNWVQQKPGQAPRGLIGGTKFLAPGTPARFSGSLLGGKAALTLSGVQPEDEAEYYCVLWYSNRWVFGGGTKLTVLGGGGDKTHTCPPCPAPELLGGPSVFLFPPKPKDTLMISRTPEVTCVVVDVSHEDPEVKFNWYVDGVEVHNAKTKPCEEQYGSTYRCVSVLTVLHQDWLNGKEYKCKVSNKALPAPIEKTISKAKGQPREPQVYTLPPSREEMTKNQVSLTCLVKGFYPSDIAVEWESNGQPENNYKTTPPVLDSDGSFFLYSKLTVDKSRWQQGNVFSCSVMHEALHNHYTQKSLSLSPGGGGSGGGGSGGGGSGGGGSGGGGSGGGGSDKTHTCPPCPAPELLGGPSVFLFPPKPKDTLMISRTPEVTCVVVDVSHEDPEVKFNWYVDGVEVHNAKTKPCEEQYGSTYRCVSVLTVLHQDWLNGKEYKCKVSNKALPAPIEKTISKAKGQPREPQVYTLPPSREEMTKNQVSLTCLVKGFYPSDIAVEWESNGQPENNYKTTPPVLDSDGSFFLYSKLTVDKSRWQQGNVFSCSVMHEALHNHYTQKSLSLSPGK

SEQ ID NO: 2303 - protein, 984 aa, synthetic construct
QVQLQESGPGLVKPSETLSLTCTVSGGSISSYYWSWIRQPPGKCLEWIGYVYYSGTTNYNPSLKSRVTISVDTSKNQFSLKLSSVTAADTAVYYCASIAVTGFYFDYWGQGTLVTVSSGGGGSGGGGSGGGGSEIVLTQSPGTLSLSPGERVTLSCRASQRVNNNYLAWYQQRPGQAPRLLIYGASSRATGIPDRFSGSGSGTDFTLTISRLEPEDFAVYYCQQYDRSPLTFGCGTKLEIKSGGGGSEVQLVESGGGLVQPGGSLKLSCAASGFTFNKYAMNWVRQAPGKGLEWVARIRSKYNNYATYYADSVKDRFTISRDDSKNTAYLQMNNLKTEDTAVYYCVRHGNFGNSYISYWAYWGQGTLVTVSSGGGGSGGGGSGGGGSQTVVTQEPSLTVSPGGTVTLTCGSSTGAVTSGNYPNWVQQKPGQAPRGLIGGTKFLAPGTPARFSGSLLGGKAALTLSGVQPEDEAEYYCVLWYSNRWVFGGGTKLTVLGGGGDKTHTCPPCPAPELLGGPSVFLFPPKPKDTLMISRTPEVTCVVVDVSHEDPEVKFNWYVDGVEVHNAKTKPCEEQYGSTYRCVSVLTVLHQDWLNGKEYKCKVSNKALPAPIEKTISKAKGQPREPQVYTLPPSREEMTKNQVSLTCLVKGFYPSDIAVEWESNGQPENNYKTTPPVLDSDGSFFLYSKLTVDKSRWQQGNVFSCSVMHEALHNHYTQKSLSLSPGKGGGGSGGGGSGGGGSGGGGSGGGGSGGGGSDKTHTCPPCPAPELLGGPSVFLFPPKPKDTLMISRTPEVTCVVVDVSHEDPEVKFNWYVDGVEVHNAKTKPCEEQYGSTYRCVSVLTVLHQDWLNGKEYKCKVSNKALPAPIEKTISKAKGQPREPQVYTLPPSREEMTKNQVSLTCLVKGFYPSDIAVEWESNGQPENNYKTTPPVLDSDGSFFLYSKLTVDKSRWQQGNVFSCSVMHEALHNHYTQKSLSLSPGK

SEQ ID NO: 2304 - protein, 982 aa, synthetic construct
QVQLQESGPGLVKPSETLSLTCTVSGGSISSYYWSWIRQPPGKCLEWIGYVYYSGTTNYNPSLKSRVTISVDTSKNQFSLKLSSVTAADTAVYYCASIAVTGFYFDYWGQGTLVTVSSGGGGSGGGGSGGGGSEIVLTQSPGTLSLSPGERVTLSCRASQRVNNNYLAWYQQRPGQAPRLLIYGASSRATGIPDRFSGSGSGTDFTLTISRLEPEDFAVYYCQQYDRSPLTFGCGTKLEIKSGGGGSEVQLVESGGGLVQPGGSLKLSCAASGFTFNKYAMNWVRQAPGKGLEWVARIRSKYNNYATYYADSVKDRFTISRDDSKNTAYLQMNNLKTEDTAVYYCVRHGNFGNSYISYWAYWGQGTLVTVSSGGGGSGGGGSGGGGSQTVVTQEPSLTVSPGGTVTLTCGSSTGAVTSGNYPNWVQQKPGQAPRGLIGGTKFLAPGTPARFSGSLLGGKAALTLSGVQPEDEAEYYCVLWYSNRWVFGGGTKLTVLGGGGDKTHTCPPCPAPELLGGPSVFLFPPKPKDTLMISRTPEVTCVVVDVSHEDPEVKFNWYVDGVEVHNAKTKPCEEQYGSTYRCVSVLTVLHQDWLNGKEYKCKVSNKALPAPIEKTISKAKGQPREPQVYTLPPSREEMTKNQVSLTCLVKGFYPSDIAVEWESNGQPENNYKTTPPVLDSDGSFFLYSKLTVDKSRWQQGNVFSCSVMHEALHNHYTQKSLSLSPGGGGSGGGGSGGGGSGGGGSGGGGSGGGGSDKTHTCPPCPAPELLGGPSVFLFPPKPKDTLMISRTPEVTCVVVDVSHEDPEVKFNWYVDGVEVHNAKTKPCEEQYGSTYRCVSVLTVLHQDWLNGKEYKCKVSNKALPAPIEKTISKAKGQPREPQVYTLPPSREEMTKNQVSLTCLVKGFYPSDIAVEWESNGQPENNYKTTPPVLDSDGSFFLYSKLTVDKSRWQQGNVFSCSVMHEALHNHYTQKSLSLSPGK

SEQ ID NO: 2305 - protein, 984 aa, synthetic construct
QVQLQESGPGLVKPSETLSLTCTVSGASISSFYWSWIRQPPGKGLEWIGYIYYSGTTNYNPSLKSRVTISVDTSKNQFSLKLSSVTAADTAVYYCARIAVAGFFFDYWGQGTLVTVSSGGGGSGGGGSGGGGSEIVLTQSPGTLSLSPGERATLSCRASQSVNKNYLAWYQQKPGQAPRLLIYGASSRATGIPDRFSGSGSGTDFTLTISRLEPEDFAVYYCQQYDRSPLTFGGGTKVEIKSGGGGSEVQLVESGGGLVQPGGSLKLSCAASGFTFNKYAMNWVRQAPGKGLEWVARIRSKYNNYATYYADSVKDRFTISRDDSKNTAYLQMNNLKTEDTAVYYCVRHGNFGNSYISYWAYWGQGTLVTVSSGGGGSGGGGSGGGGSQTVVTQEPSLTVSPGGTVTLTCGSSTGAVTSGNYPNWVQQKPGQAPRGLIGGTKFLAPGTPARFSGSLLGGKAALTLSGVQPEDEAEYYCVLWYSNRWVFGGGTKLTVLGGGGDKTHTCPPCPAPELLGGPSVFLFPPKPKDTLMISRTPEVTCVVVDVSHEDPEVKFNWYVDGVEVHNAKTKPCEEQYGSTYRCVSVLTVLHQDWLNGKEYKCKVSNKALPAPIEKTISKAKGQPREPQVYTLPPSREEMTKNQVSLTCLVKGFYPSDIAVEWESNGQPENNYKTTPPVLDSDGSFFLYSKLTVDKSRWQQGNVFSCSVMHEALHNHYTQKSLSLSPGKGGGGSGGGGSGGGGSGGGGSGGGGSGGGGSDKTHTCPPCPAPELLGGPSVFLFPPKPKDTLMISRTPEVTCVVVDVSHEDPEVKFNWYVDGVEVHNAKTKPCEEQYGSTYRCVSVLTVLHQDWLNGKEYKCKVSNKALPAPIEKTISKAKGQPREPQVYTLPPSREEMTKNQVSLTCLVKGFYPSDIAVEWESNGQPENNYKTTPPVLDSDGSFFLYSKLTVDKSRWQQGNVFSCSVMHEALHNHYTQKSLSLSPGK

SEQ ID NO: 2306 - protein, 982 aa, synthetic construct
QVQLQESGPGLVKPSETLSLTCTVSGASISSFYWSWIRQPPGKGLEWIGYIYYSGTTNYNPSLKSRVTISVDTSKNQFSLKLSSVTAADTAVYYCARIAVAGFFFDYWGQGTLVTVSSGGGGSGGGGSGGGGSEIVLTQSPGTLSLSPGERATLSCRASQSVNKNYLAWYQQKPGQAPRLLIYGASSRATGIPDRFSGSGSGTDFTLTISRLEPEDFAVYYCQQYDRSPLTFGGGTKVEIKSGGGGSEVQLVESGGGLVQPGGSLKLSCAASGFTFNKYAMNWVRQAPGKGLEWVARIRSKYNNYATYYADSVKDRFTISRDDSKNTAYLQMNNLKTEDTAVYYCVRHGNFGNSYISYWAYWGQGTLVTVSSGGGGSGGGGSGGGGSQTVVTQEPSLTVSPGGTVTLTCGSSTGAVTSGNYPNWVQQKPGQAPRGLIGGTKFLAPGTPARFSGSLLGGKAALTLSGVQPEDEAEYYCVLWYSNRWVFGGGTKLTVLGGGGDKTHTCPPCPAPELLGGPSVFLFPPKPKDTLMISRTPEVTCVVVDVSHEDPEVKFNWYVDGVEVHNAKTKPCEEQYGSTYRCVSVLTVLHQDWLNGKEYKCKVSNKALPAPIEKTISKAKGQPREPQVYTLPPSREEMTKNQVSLTCLVKGFYPSDIAVEWESNGQPENNYKTTPPVLDSDGSFFLYSKLTVDKSRWQQGNVFSCSVMHEALHNHYTQKSLSLSPGGGGSGGGGSGGGGSGGGGSGGGGSGGGGSDKTHTCPPCPAPELLGGPSVFLFPPKPKDTLMISRTPEVTCVVVDVSHEDPEVKFNWYVDGVEVHNAKTKPCEEQYGSTYRCVSVLTVLHQDWLNGKEYKCKVSNKALPAPIEKTISKAKGQPREPQVYTLPPSREEMTKNQVSLTCLVKGFYPSDIAVEWESNGQPENNYKTTPPVLDSDGSFFLYSKLTVDKSRWQQGNVFSCSVMHEALHNHYTQKSLSLSPGK

SEQ ID NO: 2307 - protein, 982 aa, synthetic construct
QVQLQESGPGLVKPSETLSLTCTVSGASISSFYWSWIRQPPGKCLEWIGYIYYSGTTNYNPSLKSRVTISVDTSKNQFSLKLSSVTAADTAVYYCARIAVAGFFFDYWGQGTLVTVSSGGGGSGGGGSGGGGSEIVLTQSPGTLSLSPGERATLSCRASQSVNKNYLAWYQQKPGQAPRLLIYGASSRATGIPDRFSGSGSGTDFTLTISRLEPEDFAVYYCQQYDRSPLTFGCGTKVEIKSGGGGSEVQLVESGGGLVQPGGSLKLSCAASGFTFNKYAMNWVRQAPGKGLEWVARIRSKYNNYATYYADSVKDRFTISRDDSKNTAYLQMNNLKTEDTAVYYCVRHGNFGNSYISYWAYWGQGTLVTVSSGGGGSGGGGSGGGGSQTVVTQEPSLTVSPGGTVTLTCGSSTGAVTSGNYPNWVQQKPGQAPRGLIGGTKFLAPGTPARFSGSLLGGKAALTLSGVQPEDEAEYYCVLWYSNRWVFGGGTKLTVLGGGGDKTHTCPPCPAPELLGGPSVFLFPPKPKDTLMISRTPEVTCVVVDVSHEDPEVKFNWYVDGVEVHNAKTKPCEEQYGSTYRCVSVLTVLHQDWLNGKEYKCKVSNKALPAPIEKTISKAKGQPREPQVYTLPPSREEMTKNQVSLTCLVKGFYPSDIAVEWESNGQPENNYKTTPPVLDSDGSFFLYSKLTVDKSRWQQGNVFSCSVMHEALHNHYTQKSLSLSPGGGGSGGGGSGGGGSGGGGSGGGGSGGGGSDKTHTCPPCPAPELLGGPSVFLFPPKPKDTLMISRTPEVTCVVVDVSHEDPEVKFNWYVDGVEVHNAKTKPCEEQYGSTYRCVSVLTVLHQDWLNGKEYKCKVSNKALPAPIEKTISKAKGQPREPQVYTLPPSREEMTKNQVSLTCLVKGFYPSDIAVEWESNGQPENNYKTTPPVLDSDGSFFLYSKLTVDKSRWQQGNVFSCSVMHEALHNHYTQKSLSLSPGK

SEQ ID NO: 2308 - protein, 993 aa, synthetic construct
QVQLVQSGAEVKKPGASVKVSCKASGYTFTNYYMHWVRQAPGLGLEWMGIINPSDGSTSYAQKFQGRVTMTRDTSTNTVYMDLSSLRSEDTAVYYCARGGNSAFYSYYDMDVWGQGTTVTVSSGGGGSGGGGSGGGGSDVVMTQTPLSLPVTLGQPASISCRSSQSLVYRDGNTYLSWFQQRPGQSPRRLIYKVSNWQSGVPDRFSGGGSGTDFTLKISRVEAEDVGVYYCMQGTHWPPTFGQGTKVEIKSGGGGSEVQLVESGGGLVQPGGSLKLSCAASGFTFNKYAMNWVRQAPGKGLEWVARIRSKYNNYATYYADSVKDRFTISRDDSKNTAYLQMNNLKTEDTAVYYCVRHGNFGNSYISYWAYWGQGTLVTVSSGGGGSGGGGSGGGGSQTVVTQEPSLTVSPGGTVTLTCGSSTGAVTSGNYPNWVQQKPGQAPRGLIGGTKFLAPGTPARFSGSLLGGKAALTLSGVQPEDEAEYYCVLWYSNRWVFGGGTKLTVLGGGGDKTHTCPPCPAPELLGGPSVFLFPPKPKDTLMISRTPEVTCVVVDVSHEDPEVKFNWYVDGVEVHNAKTKPCEEQYGSTYRCVSVLTVLHQDWLNGKEYKCKVSNKALPAPIEKTISKAKGQPREPQVYTLPPSREEMTKNQVSLTCLVKGFYPSDIAVEWESNGQPENNYKTTPPVLDSDGSFFLYSKLTVDKSRWQQGNVFSCSVMHEALHNHYTQKSLSLSPGKGGGGSGGGGSGGGGSGGGGSGGGGSGGGGSDKTHTCPPCPAPELLGGPSVFLFPPKPKDTLMISRTPEVTCVVVDVSHEDPEVKFNWYVDGVEVHNAKTKPCEEQYGSTYRCVSVLTVLHQDWLNGKEYKCKVSNKALPAPIEKTISKAKGQPREPQVYTLPPSREEMTKNQVSLTCLVKGFYPSDIAVEWESNGQPENNYKTTPPVLDSDGSFFLYSKLTVDKSRWQQGNVFSCSVMHEALHNHYTQKSLSLSPGK

SEQ ID NO: 2309 - protein, 991 aa, synthetic construct
QVQLVQSGAEVKKPGASVKVSCKASGYTFTNYYMHWVRQAPGLGLEWMGIINPSDGSTSYAQKFQGRVTMTRDTSTNTVYMDLSSLRSEDTAVYYCARGGNSAFYSYYDMDVWGQGTTVTVSSGGGGSGGGGSGGGGSDVVMTQTPLSLPVTLGQPASISCRSSQSLVYRDGNTYLSWFQQRPGQSPRRLIYKVSNWQSGVPDRFSGGGSGTDFTLKISRVEAEDVGVYYCMQGTHWPPTFGQGTKVEIKSGGGGSEVQLVESGGGLVQPGGSLKLSCAASGFTFNKYAMNWVRQAPGKGLEWVARIRSKYNNYATYYADSVKDRFTISRDDSKNTAYLQMNNLKTEDTAVYYCVRHGNFGNSYISYWAYWGQGTLVTVSSGGGGSGGGGSGGGGSQTVVTQEPSLTVSPGGTVTLTCGSSTGAVTSGNYPNWVQQKPGQAPRGLIGGTKFLAPGTPARFSGSLLGGKAALTLSGVQPEDEAEYYCVLWYSNRWVFGGGTKLTVLGGGGDKTHTCPPCPAPELLGGPSVFLFPPKPKDTLMISRTPEVTCVVVDVSHEDPEVKFNWYVDGVEVHNAKTKPCEEQYGSTYRCVSVLTVLHQDWLNGKEYKCKVSNKALPAPIEKTISKAKGQPREPQVYTLPPSREEMTKNQVSLTCLVKGFYPSDIAVEWESNGQPENNYKTTPPVLDSDGSFFLYSKLTVDKSRWQQGNVFSCSVMHEALHNHYTQKSLSLSPGGGGSGGGGSGGGGSGGGGSGGGGSGGGGSDKTHTCPPCPAPELLGGPSVFLFPPKPKDTLMISRTPEVTCVVVDVSHEDPEVKFNWYVDGVEVHNAKTKPCEEQYGSTYRCVSVLTVLHQDWLNGKEYKCKVSNKALPAPIEKTISKAKGQPREPQVYTLPPSREEMTKNQVSLTCLVKGFYPSDIAVEWESNGQPENNYKTTPPVLDSDGSFFLYSKLTVDKSRWQQGNVFSCSVMHEALHNHYTQKSLSLSPGK

SEQ ID NO: 2310 - protein, 166 aa, synthetic construct
SPGQGTQSENSCTHFPGNLPNMLRDLRDAFSRVKTFFQMKDQLDNLLLKESLLEDFKGYLGCQALSEMIQFYLEEVMPQAENQDPDIKAHVNSLGENLKTLRLRLRRCHRFLPCENGGGSGGKSKAVEQVKNAFNKLQEKGIYKAMSEFDIFINYIEAYMTMKIRN

SEQ ID NO: 2311 - protein, 991 aa, synthetic construct
QVQLVQSGAEVKKPGASVKVSCKASGYTFTNYYMHWVRQAPGLCLEWMGIINPSDGSTSYAQKFQGRVTMTRDTSTNTVYMDLSSLRSEDTAVYYCARGGNSAFYSYYDMDVWGQGTTVTVSSGGGGSGGGGSGGGGSDVVMTQTPLSLPVTLGQPASISCRSSQSLVYRDGNTYLSWFQQRPGQSPRRLIYKVSNWQSGVPDRFSGGGSGTDFTLKISRVEAEDVGVYYCMQGTHWPPTFGCGTKVEIKSGGGGSEVQLVESGGGLVQPGGSLKLSCAASGFTFNKYAMNWVRQAPGKGLEWVARIRSKYNNYATYYADSVKDRFTISRDDSKNTAYLQMNNLKTEDTAVYYCVRHGNFGNSYISYWAYWGQGTLVTVSSGGGGSGGGGSGGGGSQTVVTQEPSLTVSPGGTVTLTCGSSTGAVTSGNYPNWVQQKPGQAPRGLIGGTKFLAPGTPARFSGSLLGGKAALTLSGVQPEDEAEYYCVLWYSNRWVFGGGTKLTVLGGGGDKTHTCPPCPAPELLGGPSVFLFPPKPKDTLMISRTPEVTCVVVDVSHEDPEVKFNWYVDGVEVHNAKTKPCEEQYGSTYRCVSVLTVLHQDWLNGKEYKCKVSNKALPAPIEKTISKAKGQPREPQVYTLPPSREEMTKNQVSLTCLVKGFYPSDIAVEWESNGQPENNYKTTPPVLDSDGSFFLYSKLTVDKSRWQQGNVFSCSVMHEALHNHYTQKSLSLSPGGGGSGGGGSGGGGSGGGGSGGGGSGGGGSDKTHTCPPCPAPELLGGPSVFLFPPKPKDTLMISRTPEVTCVVVDVSHEDPEVKFNWYVDGVEVHNAKTKPCEEQYGSTYRCVSVLTVLHQDWLNGKEYKCKVSNKALPAPIEKTISKAKGQPREPQVYTLPPSREEMTKNQVSLTCLVKGFYPSDIAVEWESNGQPENNYKTTPPVLDSDGSFFLYSKLTVDKSRWQQGNVFSCSVMHEALHNHYTQKSLSLSPGK

SEQ ID NO: 2312 - protein, 496 aa, synthetic construct
QVQLQESGPGLVKPSETLSLTCTVSGASISSFYWSWIRQPPGKCLEWIGYIYYSGTTNYNPSLKSRVTISVDTSKNQFSLKLSSVTAADTAVYYCARIAVAGFFFDYWGQGTLVTVSSGGGGSGGGGSGGGGSEIVLTQSPGTLSLSPGERATLSCRASQSVNKNYLAWYQQKPGQAPRLLIYGASSRATGIPDRFSGSGSGTDFTLTISRLEPEDFAVYYCQQYDRSPLTFGCGTKVEIKSGGGGSEVQLVESGGGLVQPGGSLKLSCAASGFTFNKYAMNWVRQAPGKGLEWVARIRSKYNNYATYYADSVKDRFTISRDDSKNTAYLQMNNLKTEDTAVYYCVRHGNFGNSYISYWAYWGQGTLVTVSSGGGGSGGGGSGGGGSQTVVTQEPSLTVSPGGTVTLTCGSSTGAVTSGNYPNWVQQKPGQAPRGLIGGTKFLAPGTPARFSGSLLGGKAALTLSGVQPEDEAEYYCVLWYSNRWVFGGGTKLTVL

SEQ ID NO: 2313 - protein, 503 aa, synthetic construct
QVQLQESGPGLVKPSETLSLTCTVSGDSISSYYWTWIRQPPGKGLEWIGYIYYSGTTNYNPSLKSRVTISVDTSKSQFSLKLSSVTAADTAVYYCASIAVRGFFFDYWGQGTLVTVSSGGGGSGGGGSGGGGSEIVLTQSPGTLSLSPGERATLSCRASQSVSSSYLAWYQQKPGQAPRLLIYGASTRATGIPDRFSGSGSGTDFTLTISRLEPEDFAVYYCQQYGTSPLTFGGGTKVEIKRSGGGGSEVQLVESGGGLVQPGGSLKLSCAASGFTFNKYAMNWVRQAPGKGLEWVARIRSKYNNYATYYADSVKDRFTISRDDSKNTAYLQMNNLKTEDTAVYYCVRHGNFGNSYISYWAYWGQGTLVTVSSGGGGSGGGGSGGGGSQTVVTQEPSLTVSPGGTVTLTCGSSTGAVTSGNYPNWVQQKPGQAPRGLIGGTKFLAPGTPARFSGSLLGGKAALTLSGVQPEDEAEYYCVLWYSNRWVFGGGTKLTVLHHHHHH

SEQ ID NO: 2314 - protein, 618 aa, Homo sapiens
MVSPRMSGLLSQTVILALIFLPQTRPAGVFELQIHSFGPGPGPGAPRSPCSARLPCRLFFRVCLKPGLSEEAAESPCALGAALSARGPVYTEQPGAPAPDLPLPDGLLQVPFRDAWPGTFSFIIETWREELGDQIGGPAWSLLARVAGRRRLAAGGPWARDIQRAGAWELRFSYRARCEPPAVGTACTRLCRPRSAPSRCGPGLRPCAPLEDECEAPLVCRAGCSPEHGFCEQPGECRCLEGWTGPLCTVPVSTSSCLSPRGPSSATTGCLVPGPGPCDGNPCANGGSCSETPRSFECTCPRGFYGLRCEVSGVTCADGPCFNGGLCVGGADPDSAYICHCPPGFQGSNCEKRVDRCSLQPCRNGGLCLDLGHALRCRCRAGFAGPRCEHDLDDCAGRACANGGTCVEGGGAHRCSCALGFGGRDCRERADPCAARPCAHGGRCYAHFSGLVCACAPGYMGARCEFPVHPDGASALPAAPPGLRPGDPQRYLLPPALGLLVAAGVAGAALLLVHVRRRGHSQDAGSRLLAGTPEPSVHALPDALNNLRTQEGSGDGPSSSVDWNRPEDVDPQGIYVISAPSIYAREVATPLFPPLHTGRAGQRQHLLFPYPSSILSVK

SEQ ID NO: 2315 - protein, 492 aa, Homo sapiens
MVSPRMSGLLSQTVILALIFLPQTRPAGVFELQIHSFGPGPGPGAPRSPCSARLPCRLFFRVCLKPGLSEEAAESPCALGAALSARGPVYTEQPGAPAPDLPLPDGLLQVPFRDAWPGTFSFIIETWREELGDQIGGPAWSLLARVAGRRRLAAGGPWARDIQRAGAWELRFSYRARCEPPAVGTACTRLCRPRSAPSRCGPGLRPCAPLEDECEAPLVCRAGCSPEHGFCEQPGECRCLEGWTGPLCTVPVSTSSCLSPRGPSSATTGCLVPGPGPCDGNPCANGGSCSETPRSFECTCPRGFYGLRCEVSGVTCADGPCFNGGLCVGGADPDSAYICHCPPGFQGSNCEKRVDRCSLQPCRNGGLCLDLGHALRCRCRAGFAGPRCEHDLDDCAGRACANGGTCVEGGGAHRCSCALGFGGRDCRERADPCAARPCAHGGRCYAHFSGLVCACAPGYMGARCEFPVHPDGASALPAAPPGLRPGDPQRYL

SEQ ID NO: 2316 - protein, 175 aa, Homo sapiens
MVSPRMSGLLSQTVILALIFLPQTRPAGVFELQIHSFGPGPGPGAPRSPCSARLPCRLFFRVCLKPGLSEEAAESPCALGAALSARGPVYTEQPGAPAPDLPLPDGLLQVPFRDAWPGTFSFIIETWREELGDQIGGPAWSLLARVAGRRRLAAGGPWARDIQRAGAWELRFSYR

SEQ ID NO: 2317 - protein, 40 aa, Homo sapiens
ARCEPPAVGTACTRLCRPRSAPSRCGPGLRPCAPLEDECE

SEQ ID NO: 2318 - protein, 34 aa, Homo sapiens
APLVCRAGCSPEHGFCEQPGECRCLEGWTGPLCT

SEQ ID NO: 2319 - protein, 37 aa, Homo sapiens
GPGPCDGNPCANGGSCSETPRSFECTCPRGFYGLRCE

SEQ ID NO: 2320 - protein, 114 aa, Homo sapiens
NWVNVISDLKKIEDLIQSMHIDATLYTESDVHPSCKVTAMKCFLLELQVISLASGDASIHDTVENLIILANNSLSSNGAVTESGCKECEELEEKNIKEFLQSFVHIVQMFINTS

SEQ ID NO: 2321 - protein, 37 aa, Homo sapiens
RVDRCSLQPCRNGGLCLDLGHALRCRCRAGFAGPRCE

SEQ ID NO: 2322 - protein, 78 aa, Homo sapiens
SGVTCADGPCFNGGLCVGGADPDSAYICHCPPGFQGSNCEKRVDRCSLQPCRNGGLCLDLGHALRCRCRAGFAGPRCE

SEQ ID NO: 2323 - protein, 37 aa, Homo sapiens
DLDDCAGRACANGGTCVEGGGAHRCSCALGFGGRDCR

SEQ ID NO: 2324 - protein, 37 aa, Homo sapiens
RADPCAARPCAHGGRCYAHFSGLVCACAPGYMGARCE

SEQ ID NO: 2325 - protein, 548 aa, Homo sapiens
MVSPRMSGLLSQTVILALIFLPQTRPAGVFELQIHSFGPGPGPGAPRSPCSARLPCRLFFRVCLKPGLSEEAAESPCALGAALSARGPVYTEQPGAPAPDLPLPDGLLQVPFRDAWPGTFSFIIETWREELGDQIGGPAWSLLARVAGRRRLAAGGPWARDIQRAGAWELRFSYRARCEPPAVGTACTRLCRPRSAPSRCGPGLRPCAPLEDECEAPLVCRAGCSPEHGFCEQPGECRCLEGWTGPLCTVPVSTSSCLSPRGPSSATTGCLVPGPGPCDGNPCANGGSCSETPRSFECTCPRGFYGLRCEVSGVTCADGPCFNGGLCVGGADPDSAYICHCPPGFQGSNCEKRVDRCSLQPCRNGGLCLDLGHALRCRCRAGFAGPRCEHDLDDCAGRACANGGTCVEGGGAHRCSCALGFGGRDCRERADPCAARPCAHGGRCYAHFSGLVCACAPGYMGARCEFPVHPDGASALPAAPPGLRPGDPQRYLSGGGGSGAGVIAVIVVVVIAIVAGIVVLVISRKKRMAKYEKAEIKEMGEMHRELNA

SEQ ID NO: 2326 - protein, 408 aa, Homo sapiens
MGWSCIILFLVATATGVHSGKPIPNPLLGLDSTSGARCEPPAVGTACTRLCRPRSAPSRCGPGLRPCAPLEDECEAPLVCRAGCSPEHGFCEQPGECRCLEGWTGPLCTVPVSTSSCLSPRGPSSATTGCLVPGPGPCDGNPCANGGSCSETPRSFECTCPRGFYGLRCEVSGVTCADGPCFNGGLCVGGADPDSAYICHCPPGFQGSNCEKRVDRCSLQPCRNGGLCLDLGHALRCRCRAGFAGPRCEHDLDDCAGRACANGGTCVEGGGAHRCSCALGFGGRDCRERADPCAARPCAHGGRCYAHFSGLVCACAPGYMGARCEFPVHPDGASALPAAPPGLRPGDPQRYLSGGGGSGAGVIAVIVVVVIAIVAGIVVLVISRKKRMAKYEKAEIKEMGEMHRELNA

SEQ ID NO: 2327 - protein, 368 aa, Homo sapiens
MGWSCIILFLVATATGVHSGKPIPNPLLGLDSTSGAPLVCRAGCSPEHGFCEQPGECRCLEGWTGPLCTVPVSTSSCLSPRGPSSATTGCLVPGPGPCDGNPCANGGSCSETPRSFECTCPRGFYGLRCEVSGVTCADGPCFNGGLCVGGADPDSAYICHCPPGFQGSNCEKRVDRCSLQPCRNGGLCLDLGHALRCRCRAGFAGPRCEHDLDDCAGRACANGGTCVEGGGAHRCSCALGFGGRDCRERADPCAARPCAHGGRCYAHFSGLVCACAPGYMGARCEFPVHPDGASALPAAPPGLRPGDPQRYLSGGGGSGAGVIAVIVVVVIAIVAGIVVLVISRKKRMAKYEKAEIKEMGEMHRELNA

SEQ ID NO: 2328 - protein, 310 aa, Homo sapiens
MGWSCIILFLVATATGVHSGKPIPNPLLGLDSTSGGPGPCDGNPCANGGSCSETPRSFECTCPRGFYGLRCEVSGVTCADGPCFNGGLCVGGADPDSAYICHCPPGFQGSNCEKRVDRCSLQPCRNGGLCLDLGHALRCRCRAGFAGPRCEHDLDDCAGRACANGGTCVEGGGAHRCSCALGFGGRDCRERADPCAARPCAHGGRCYAHFSGLVCACAPGYMGARCEFPVHPDGASALPAAPPGLRPGDPQRYLSGGGGSGAGVIAVIVVVVIAIVAGIVVLVISRKKRMAKYEKAEIKEMGEMHRELNA

SEQ ID NO: 2329 - protein, 272 aa, Homo sapiens
MGWSCIILFLVATATGVHSGKPIPNPLLGLDSTSGSGVTCADGPCFNGGLCVGGADPDSAYICHCPPGFQGSNCEKRVDRCSLQPCRNGGLCLDLGHALRCRCRAGFAGPRCEHDLDDCAGRACANGGTCVEGGGAHRCSCALGFGGRDCRERADPCAARPCAHGGRCYAHFSGLVCACAPGYMGARCEFPVHPDGASALPAAPPGLRPGDPQRYLSGGGGSGAGVIAVIVVVVIAIVAGIVVLVISRKKRMAKYEKAEIKEMGEMHRELNA

SEQ ID NO: 2330 - protein, 231 aa, Homo sapiens
MGWSCIILFLVATATGVHSGKPIPNPLLGLDSTSGRVDRCSLQPCRNGGLCLDLGHALRCRCRAGFAGPRCEHDLDDCAGRACANGGTCVEGGGAHRCSCALGFGGRDCRERADPCAARPCAHGGRCYAHFSGLVCACAPGYMGARCEFPVHPDGASALPAAPPGLRPGDPQRYLSGGGGSGAGVIAVIVVVVIAIVAGIVVLVISRKKRMAKYEKAEIKEMGEMHRELNA

SEQ ID NO: 2331 - protein, 193 aa, Homo sapiens
MGWSCIILFLVATATGVHSGKPIPNPLLGLDSTSGDLDDCAGRACANGGTCVEGGGAHRCSCALGFGGRDCRERADPCAARPCAHGGRCYAHFSGLVCACAPGYMGARCEFPVHPDGASALPAAPPGLRPGDPQRYLSGGGGSGAGVIAVIVVVVIAIVAGIVVLVISRKKRMAKYEKAEIKEMGEMHRELNA

SEQ ID NO: 2332 - protein, 14 aa, synthetic construct
GSSTGAVTSGYYPN

SEQ ID NO: 2333 - protein, 7 aa, synthetic construct
GTKFLAP

SEQ ID NO: 2334 - protein, 9 aa, synthetic construct
ALWYSNRWV

SEQ ID NO: 2335 - protein, 5 aa, synthetic construct
IYAMN

SEQ ID NO: 2336 - protein, 19 aa, synthetic construct
RIRSKYNNYATYYADSVKS

SEQ ID NO: 2337 - protein, 14 aa, synthetic construct
HGNFGNSYVSFFAY

SEQ ID NO: 2338 - protein, 125 aa, synthetic construct
EVQLVESGGGLVQPGGSLKLSCAASGFTFNIYAMNWVRQAPGKGLEWVARIRSKYNNYATYYADSVKSRFTISRDDSKNTAYLQMNNLKTEDTAVYYCVRHGNFGNSYVSFFAYWGQGTLVTVSS

SEQ ID NO: 2339 - protein, 109 aa, synthetic construct
QTVVTQEPSLTVSPGGTVTLTCGSSTGAVTSGYYPNWVQQKPGQAPRGLIGGTKFLAPGTPARFSGSLLGGKAALTLSGVQPEDEAEYYCALWYSNRWVFGGGTKLTVL

SEQ ID NO: 2340 - protein, 249 aa, synthetic construct
EVQLVESGGGLVQPGGSLKLSCAASGFTFNIYAMNWVRQAPGKGLEWVARIRSKYNNYATYYADSVKSRFTISRDDSKNTAYLQMNNLKTEDTAVYYCVRHGNFGNSYVSFFAYWGQGTLVTVSSGGGGSGGGGSGGGGSQTVVTQEPSLTVSPGGTVTLTCGSSTGAVTSGYYPNWVQQKPGQAPRGLIGGTKFLAPGTPARFSGSLLGGKAALTLSGVQPEDEAEYYCALWYSNRWVFGGGTKLTVL

SEQ ID NO: 2341 - protein, 5 aa, synthetic construct
KYAMN

SEQ ID NO: 2342 - protein, 19 aa, synthetic construct
RIRSKYNNYATYYADSVKD

SEQ ID NO: 2343 - protein, 14 aa, synthetic construct
HGNFGNSYISYWAY

SEQ ID NO: 2344 - protein, 125 aa, synthetic construct
EVQLVESGGGLVQPGGSLKLSCAASGFTFNKYAMNWVRQAPGKGLEWVARIRSKYNNYATYYADSVKDRFTISRDDSKNTAYLQMNNLKTEDTAVYYCVRHGNFGNSYISYWAYWGQGTLVTVSS

SEQ ID NO: 2345 - protein, 249 aa, synthetic construct
EVQLVESGGGLVQPGGSLKLSCAASGFTFNKYAMNWVRQAPGKGLEWVARIRSKYNNYATYYADSVKDRFTISRDDSKNTAYLQMNNLKTEDTAVYYCVRHGNFGNSYISYWAYWGQGTLVTVSSGGGGSGGGGSGGGGSQTVVTQEPSLTVSPGGTVTLTCGSSTGAVTSGYYPNWVQQKPGQAPRGLIGGTKFLAPGTPARFSGSLLGGKAALTLSGVQPEDEAEYYCALWYSNRWVFGGGTKLTVL

SEQ ID NO: 2346 - protein, 9 aa, synthetic construct
ALWYSNRWV

SEQ ID NO: 2347 - protein, 5 aa, synthetic construct
SYAMN

SEQ ID NO: 2348 - protein, 19 aa, synthetic construct
RIRSKYNNYATYYADSVKG

SEQ ID NO: 2349 - protein, 14 aa, synthetic construct
HGNFGNSYLSFWAY

SEQ ID NO: 2350 - protein, 125 aa, synthetic construct
EVQLVESGGGLEQPGGSLKLSCAASGFTFNSYAMNWVRQAPGKGLEWVARIRSKYNNYATYYADSVKGRFTISRDDSKNTAYLQMNNLKTEDTAVYYCVRHGNFGNSYLSFWAYWGQGTLVTVSS

SEQ ID NO: 2351 - protein, 249 aa, synthetic construct
EVQLVESGGGLEQPGGSLKLSCAASGFTFNSYAMNWVRQAPGKGLEWVARIRSKYNNYATYYADSVKGRFTISRDDSKNTAYLQMNNLKTEDTAVYYCVRHGNFGNSYLSFWAYWGQGTLVTVSSGGGGSGGGGSGGGGSQTVVTQEPSLTVSPGGTVTLTCGSSTGAVTSGYYPNWVQQKPGQAPRGLIGGTKFLAPGTPARFSGSLLGGKAALTLSGVQPEDEAEYYCALWYSNRWVFGGGTKLTVL

SEQ ID NO: 2352 - protein, 5 aa, synthetic construct
RYAMN

SEQ ID NO: 2353 - protein, 14 aa, synthetic construct
HGNFGNSYLSYFAY

SEQ ID NO: 2354 - protein, 125 aa, synthetic construct
EVQLVESGGGLVQPGGSLKLSCAASGFTFNRYAMNWVRQAPGKGLEWVARIRSKYNNYATYYADSVKGRFTISRDDSKNTAYLQMNNLKTEDTAVYYCVRHGNFGNSYLSYFAYWGQGTLVTVSS

SEQ ID NO: 2355 - protein, 249 aa, synthetic construct
EVQLVESGGGLVQPGGSLKLSCAASGFTFNRYAMNWVRQAPGKGLEWVARIRSKYNNYATYYADSVKGRFTISRDDSKNTAYLQMNNLKTEDTAVYYCVRHGNFGNSYLSYFAYWGQGTLVTVSSGGGGSGGGGSGGGGSQTVVTQEPSLTVSPGGTVTLTCGSSTGAVTSGYYPNWVQQKPGQAPRGLIGGTKFLAPGTPARFSGSLLGGKAALTLSGVQPEDEAEYYCALWYSNRWVFGGGTKLTVL

SEQ ID NO: 2356 - protein, 14 aa, synthetic construct
RSSTGAVTSGYYPN

SEQ ID NO: 2357 - protein, 7 aa, synthetic construct
ATDMRPS

SEQ ID NO: 2358 - protein, 5 aa, synthetic construct
VYAMN

SEQ ID NO: 2359 - protein, 19 aa, synthetic construct
RIRSKYNNYATYYADSVKK

SEQ ID NO: 2360 - protein, 14 aa, synthetic construct
HGNFGNSYLSWWAY

SEQ ID NO: 2361 - protein, 125 aa, synthetic construct
EVQLVESGGGLVQPGGSLKLSCAASGFTFNVYAMNWVRQAPGKGLEWVARIRSKYNNYATYYADSVKKRFTISRDDSKNTAYLQMNNLKTEDTAVYYCVRHGNFGNSYLSWWAYWGQGTLVTVSS

SEQ ID NO: 2362 - protein, 109 aa, synthetic construct
QTVVTQEPSLTVSPGGTVTLTCRSSTGAVTSGYYPNWVQQKPGQAPRGLIGATDMRPSGTPARFSGSLLGGKAALTLSGVQPEDEAEYYCALWYSNRWVFGGGTKLTVL

SEQ ID NO: 2363 - protein, 249 aa, synthetic construct
EVQLVESGGGLVQPGGSLKLSCAASGFTFNVYAMNWVRQAPGKGLEWVARIRSKYNNYATYYADSVKKRFTISRDDSKNTAYLQMNNLKTEDTAVYYCVRHGNFGNSYLSWWAYWGQGTLVTVSSGGGGSGGGGSGGGGSQTVVTQEPSLTVSPGGTVTLTCRSSTGAVTSGYYPNWVQQKPGQAPRGLIGATDMRPSGTPARFSGSLLGGKAALTLSGVQPEDEAEYYCALWYSNRWVFGGGTKLTVL

SEQ ID NO: 2364 - protein, 19 aa, synthetic construct
RIRSKYNNYATYYADSVKS

SEQ ID NO: 2365 - protein, 14 aa, synthetic construct
HGNFGNSYTSYYAY

SEQ ID NO: 2366 - protein, 125 aa, synthetic construct
EVQLVESGGGLVQPGGSLKLSCAASGFTFNKYAMNWVRQAPGKGLEWVARIRSKYNNYATYYADSVKSRFTISRDDSKNTAYLQMNNLKTEDTAVYYCVRHGNFGNSYTSYYAYWGQGTLVTVSS

SEQ ID NO: 2367 - protein, 249 aa, synthetic construct
EVQLVESGGGLVQPGGSLKLSCAASGFTFNKYAMNWVRQAPGKGLEWVARIRSKYNNYATYYADSVKSRFTISRDDSKNTAYLQMNNLKTEDTAVYYCVRHGNFGNSYTSYYAYWGQGTLVTVSSGGGGSGGGGSGGGGSQTVVTQEPSLTVSPGGTVTLTCGSSTGAVTSGYYPNWVQQKPGQAPRGLIGGTKFLAPGTPARFSGSLLGGKAALTLSGVQPEDEAEYYCALWYSNRWVFGGGTKLTVL

SEQ ID NO: 2368 - protein, 5 aa, synthetic construct
GYAMN

SEQ ID NO: 2369 - protein, 19 aa, synthetic construct
RIRSKYNNYATYYADSVKE

SEQ ID NO: 2370 - protein, 14 aa, synthetic construct
HRNFGNSYLSWFAY

SEQ ID NO: 2371 - protein, 125 aa, synthetic construct
EVQLVESGGGLVQPGGSLKLSCAASGFTFNGYAMNWVRQAPGKGLEWVARIRSKYNNYATYYADSVKERFTISRDDSKNTAYLQMNNLKTEDTAVYYCVRHRNFGNSYLSWFAYWGQGTLVTVSS

SEQ ID NO: 2372 - protein, 109 aa, synthetic construct; identical to SEQ ID NO: 2362

SEQ ID NO: 2373 - protein, 249 aa, synthetic construct
EVQLVESGGGLVQPGGSLKLSCAASGFTFNGYAMNWVRQAPGKGLEWVARIRSKYNNYATYYADSVKERFTISRDDSKNTAYLQMNNLKTEDTAVYYCVRHRNFGNSYLSWFAYWGQGTLVTVSSGGGGSGGGGSGGGGSQTVVTQEPSLTVSPGGTVTLTCRSSTGAVTSGYYPNWVQQKPGQAPRGLIGATDMRPSGTPARFSGSLLGGKAALTLSGVQPEDEAEYYCALWYSNRWVFGGGTKLTVL

SEQ ID NO: 2374 - protein, 14 aa, synthetic construct
HGNFGNSYISWWAY

SEQ ID NO: 2375 - protein, 125 aa, synthetic construct
EVQLVESGGGLVQPGGSLKLSCAASGFTFNVYAMNWVRQAPGKGLEWVARIRSKYNNYATYYADSVKKRFTISRDDSKNTAYLQMNNLKTEDTAVYYCVRHGNFGNSYISWWAYWGQGTLVTVSS

SEQ ID NO: 2376 - protein, 249 aa, synthetic construct
EVQLVESGGGLVQPGGSLKLSCAASGFTFNVYAMNWVRQAPGKGLEWVARIRSKYNNYATYYADSVKKRFTISRDDSKNTAYLQMNNLKTEDTAVYYCVRHGNFGNSYISWWAYWGQGTLVTVSSGGGGSGGGGSGGGGSQTVVTQEPSLTVSPGGTVTLTCGSSTGAVTSGYYPNWVQQKPGQAPRGLIGGTKFLAPGTPARFSGSLLGGKAALTLSGVQPEDEAEYYCALWYSNRWVFGGGTKLTVL

SEQ ID NO: 2377 - protein, 14 aa, synthetic construct
GSSTGAVTSGNYPN

SEQ ID NO: 2378 - protein, 9 aa, synthetic construct
VLWYSNRWV

SEQ ID NO: 2379 - protein, 14 aa, synthetic construct
HGNFGNSYVSWWAY

SEQ ID NO: 2380 - protein, 125 aa, synthetic construct
EVQLVESGGGLVQPGGSLKLSCAASGFTFNSYAMNWVRQAPGKGLEWVARIRSKYNNYATYYADSVKGRFTISRDDSKNTAYLQMNNLKTEDTAVYYCVRHGNFGNSYVSWWAYWGQGTLVTVSS

SEQ ID NO: 2381 - protein, 109 aa, synthetic construct
QTVVTQEPSLTVSPGGTVTLTCGSSTGAVTSGNYPNWVQQKPGQAPRGLIGGTKFLAPGTPARFSGSLLGGKAALTLSGVQPEDEAEYYCVLWYSNRWVFGGGTKLTVL

SEQ ID NO: 2382 - protein, 249 aa, synthetic construct
EVQLVESGGGLVQPGGSLKLSCAASGFTFNSYAMNWVRQAPGKGLEWVARIRSKYNNYATYYADSVKGRFTISRDDSKNTAYLQMNNLKTEDTAVYYCVRHGNFGNSYVSWWAYWGQGTLVTVSSGGGGSGGGGSGGGGSQTVVTQEPSLTVSPGGTVTLTCGSSTGAVTSGNYPNWVQQKPGQAPRGLIGGTKFLAPGTPARFSGSLLGGKAALTLSGVQPEDEAEYYCVLWYSNRWVFGGGTKLTVL

SEQ ID NO: 2383 - protein, 125 aa, synthetic construct
EVQLVESGGGLVQPGGSLRLSCAASGFTFNSYAMNWVRQAPGKGLEWVARIRSKYNNYATYYADSVKGRFTISRDDSKNTAYLQMNSLKTEDTAVYYCVRHGNFGNSYVSWWAYWGQGTLVTVSS

SEQ ID NO: 2384 - protein, 109 aa, synthetic construct; identical to SEQ ID NO: 2381

SEQ ID NO: 2385 - protein, 249 aa, synthetic construct
EVQLVESGGGLVQPGGSLRLSCAASGFTFNSYAMNWVRQAPGKGLEWVARIRSKYNNYATYYADSVKGRFTISRDDSKNTAYLQMNSLKTEDTAVYYCVRHGNFGNSYVSWWAYWGQGTLVTVSSGGGGSGGGGSGGGGSQTVVTQEPSLTVSPGGTVTLTCGSSTGAVTSGNYPNWVQQKPGQAPRGLIGGTKFLAPGTPARFSGSLLGGKAALTLSGVQPEDEAEYYCVLWYSNRWVFGGGTKLTVL

SEQ ID NO: 2386 - protein, 109 aa, synthetic construct; identical to SEQ ID NO: 2381

SEQ ID NO: 2387 - protein, 249 aa, synthetic construct
EVQLVESGGGLVQPGGSLKLSCAASGFTFNKYAMNWVRQAPGKGLEWVARIRSKYNNYATYYADSVKDRFTISRDDSKNTAYLQMNNLKTEDTAVYYCVRHGNFGNSYISYWAYWGQGTLVTVSSGGGGSGGGGSGGGGSQTVVTQEPSLTVSPGGTVTLTCGSSTGAVTSGNYPNWVQQKPGQAPRGLIGGTKFLAPGTPARFSGSLLGGKAALTLSGVQPEDEAEYYCVLWYSNRWVFGGGTKLTVL

SEQ ID NO: 2388 - protein, 109 aa, synthetic construct
ELVVTQEPSLTVSPGGTVTLTCGSSTGAVTSGYYPNWVQQKPGQAPRGLIGGTKFLAPGTPARFSGSLLGGKAALTLSGVQPEDEAEYYCALWYSNRWVFGGGTKLTVL

SEQ ID NO: 2389 - protein, 109 aa, synthetic construct
ELVVTQEPSLTVSPGGTVTLTCGSSTGAVTSGNYPNWVQQKPGQAPRGLIGGTKFLAPGTPARFSGSLLGGKAALTLSGVQPEDEAEYYCVLWYSNRWVFGGGTKLTVL

SEQ ID NO: 2390 - protein, 125 aa, synthetic construct
EVQLLESGGGLVQPGGSLKLSCAASGFTFNIYAMNWVRQAPGKGLEWVARIRSKYNNYATYYADSVKSRFTISRDDSKNTAYLQMNNLKTEDTAVYYCVRHGNFGNSYVSFFAYWGQGTLVTVSS

SEQ ID NO: 2391 - protein, 125 aa, synthetic construct
EVQLLESGGGLVQPGGSLKLSCAASGFTFNKYAMNWVRQAPGKGLEWVARIRSKYNNYATYYADSVKDRFTISRDDSKNTAYLQMNNLKTEDTAVYYCVRHGNFGNSYISYWAYWGQGTLVTVSS

SEQ ID NO: 2392 - protein, 125 aa, synthetic construct
EVQLLESGGGLEQPGGSLKLSCAASGFTFNSYAMNWVRQAPGKGLEWVARIRSKYNNYATYYADSVKGRFTISRDDSKNTAYLQMNNLKTEDTAVYYCVRHGNFGNSYLSFWAYWGQGTLVTVSS

SEQ ID NO: 2393 - protein, 125 aa, synthetic construct
EVQLLESGGGLVQPGGSLKLSCAASGFTFNRYAMNWVRQAPGKGLEWVARIRSKYNNYATYYADSVKGRFTISRDDSKNTAYLQMNNLKTEDTAVYYCVRHGNFGNSYLSYFAYWGQGTLVTVSS

SEQ ID NO: 2394 - protein, 125 aa, synthetic construct
EVQLLESGGGLVQPGGSLKLSCAASGFTFNVYAMNWVRQAPGKGLEWVARIRSKYNNYATYYADSVKKRFTISRDDSKNTAYLQMNNLKTEDTAVYYCVRHGNFGNSYLSWWAYWGQGTLVTVSS

SEQ ID NO: 2395 - protein, 125 aa, synthetic construct
EVQLLESGGGLVQPGGSLKLSCAASGFTFNKYAMNWVRQAPGKGLEWVARIRSKYNNYATYYADSVKSRFTISRDDSKNTAYLQMNNLKTEDTAVYYCVRHGNFGNSYTSYYAYWGQGTLVTVSS

SEQ ID NO: 2396 - protein, 125 aa, synthetic construct
EVQLLESGGGLVQPGGSLKLSCAASGFTFNGYAMNWVRQAPGKGLEWVARIRSKYNNYATYYADSVKERFTISRDDSKNTAYLQMNNLKTEDTAVYYCVRHRNFGNSYLSWFAYWGQGTLVTVSS

SEQ ID NO: 2397 - protein, 125 aa, synthetic construct
EVQLLESGGGLVQPGGSLKLSCAASGFTFNVYAMNWVRQAPGKGLEWVARIRSKYNNYATYYADSVKKRFTISRDDSKNTAYLQMNNLKTEDTAVYYCVRHGNFGNSYISWWAYWGQGTLVTVSS

SEQ ID NO: 2398 - protein, 125 aa, synthetic construct
EVQLLESGGGLVQPGGSLKLSCAASGFTFNSYAMNWVRQAPGKGLEWVARIRSKYNNYATYYADSVKGRFTISRDDSKNTAYLQMNNLKTEDTAVYYCVRHGNFGNSYVSWWAYWGQGTLVTVSS

SEQ ID NO: 2399 - protein, 249 aa, synthetic construct
EVQLLESGGGLVQPGGSLKLSCAASGFTFNIYAMNWVRQAPGKGLEWVARIRSKYNNYATYYADSVKSRFTISRDDSKNTAYLQMNNLKTEDTAVYYCVRHGNFGNSYVSFFAYWGQGTLVTVSSGGGGSGGGGSGGGGSELVVTQEPSLTVSPGGTVTLTCGSSTGAVTSGYYPNWVQQKPGQAPRGLIGGTKFLAPGTPARFSGSLLGGKAALTLSGVQPEDEAEYYCALWYSNRWVFGGGTKLTVL

SEQ ID NO: 2400 - protein, 249 aa, synthetic construct; identical to SEQ ID NO: 2399

SEQ ID NO: 2401 - protein, 249 aa, synthetic construct
EVQLLESGGGLVQPGGSLKLSCAASGFTFNKYAMNWVRQAPGKGLEWVARIRSKYNNYATYYADSVKDRFTISRDDSKNTAYLQMNNLKTEDTAVYYCVRHGNFGNSYISYWAYWGQGTLVTVSSGGGGSGGGGSGGGGSELVVTQEPSLTVSPGGTVTLTCGSSTGAVTSGYYPNWVQQKPGQAPRGLIGGTKFLAPGTPARFSGSLLGGKAALTLSGVQPEDEAEYYCALWYSNRWVFGGGTKLTVL

SEQ ID NO: 2402 - protein, 249 aa, synthetic construct
EVQLLESGGGLEQPGGSLKLSCAASGFTFNSYAMNWVRQAPGKGLEWVARIRSKYNNYATYYADSVKGRFTISRDDSKNTAYLQMNNLKTEDTAVYYCVRHGNFGNSYLSFWAYWGQGTLVTVSSGGGGSGGGGSGGGGSELVVTQEPSLTVSPGGTVTLTCGSSTGAVTSGYYPNWVQQKPGQAPRGLIGGTKFLAPGTPARFSGSLLGGKAALTLSGVQPEDEAEYYCALWYSNRWVFGGGTKLTVL

SEQ ID NO: 2403 - protein, 249 aa, synthetic construct
EVQLLESGGGLVQPGGSLKLSCAASGFTFNRYAMNWVRQAPGKGLEWVARIRSKYNNYATYYADSVKGRFTISRDDSKNTAYLQMNNLKTEDTAVYYCVRHGNFGNSYLSYFAYWGQGTLVTVSSGGGGSGGGGSGGGGSELVVTQEPSLTVSPGGTVTLTCGSSTGAVTSGYYPNWVQQKPGQAPRGLIGGTKFLAPGTPARFSGSLLGGKAALTLSGVQPEDEAEYYCALWYSNRWVFGGGTKLTVL

SEQ ID NO: 2404 - protein, 249 aa, synthetic construct
EVQLLESGGGLVQPGGSLKLSCAASGFTFNVYAMNWVRQAPGKGLEWVARIRSKYNNYATYYADSVKKRFTISRDDSKNTAYLQMNNLKTEDTAVYYCVRHGNFGNSYLSWWAYWGQGTLVTVSSGGGGSGGGGSGGGGSELVVTQEPSLTVSPGGTVTLTCRSSTGAVTSGYYPNWVQQKPGQAPRGLIGATDMRPSGTPARFSGSLLGGKAALTLSGVQPEDEAEYYCALWYSNRWVFGGGTKLTVL

SEQ ID NO: 2405 - protein, 249 aa, synthetic construct
EVQLLESGGGLVQPGGSLKLSCAASGFTFNKYAMNWVRQAPGKGLEWVARIRSKYNNYATYYADSVKSRFTISRDDSKNTAYLQMNNLKTEDTAVYYCVRHGNFGNSYTSYYAYWGQGTLVTVSSGGGGSGGGGSGGGGSELVVTQEPSLTVSPGGTVTLTCGSSTGAVTSGYYPNWVQQKPGQAPRGLIGGTKFLAPGTPARFSGSLLGGKAALTLSGVQPEDEAEYYCALWYSNRWVFGGGTKLTVL

SEQ ID NO: 2406 - protein, 249 aa, synthetic construct
EVQLLESGGGLVQPGGSLKLSCAASGFTFNGYAMNWVRQAPGKGLEWVARIRSKYNNYATYYADSVKERFTISRDDSKNTAYLQMNNLKTEDTAVYYCVRHRNFGNSYLSWFAYWGQGTLVTVSSGGGGSGGGGSGGGGSELVVTQEPSLTVSPGGTVTLTCRSSTGAVTSGYYPNWVQQKPGQAPRGLIGATDMRPSGTPARFSGSLLGGKAALTLSGVQPEDEAEYYCALWYSNRWVFGGGTKLTVL

SEQ ID NO: 2407 - protein, 249 aa, synthetic construct
EVQLLESGGGLVQPGGSLKLSCAASGFTFNVYAMNWVRQAPGKGLEWVARIRSKYNNYATYYADSVKKRFTISRDDSKNTAYLQMNNLKTEDTAVYYCVRHGNFGNSYISWWAYWGQGTLVTVSSGGGGSGGGGSGGGGSELVVTQEPSLTVSPGGTVTLTCGSSTGAVTSGYYPNWVQQKPGQAPRGLIGGTKFLAPGTPARFSGSLLGGKAALTLSGVQPEDEAEYYCALWYSNRWVFGGGTKLTVL

SEQ ID NO: 2408 - protein, 249 aa, synthetic construct
EVQLLESGGGLVQPGGSLKLSCAASGFTFNSYAMNWVRQAPGKGLEWVARIRSKYNNYATYYADSVKGRFTISRDDSKNTAYLQMNNLKTEDTAVYYCVRHGNFGNSYVSWWAYWGQGTLVTVSSGGGGSGGGGSGGGGSELVVTQEPSLTVSPGGTVTLTCGSSTGAVTSGNYPNWVQQKPGQAPRGLIGGTKFLAPGTPARFSGSLLGGKAALTLSGVQPEDEAEYYCVLWYSNRWVFGGGTKLTVL

SEQ ID NO: 2409 - protein, 7 aa, synthetic construct
QRVNNNY

SEQ ID NO: 2410 - protein, 7 aa, synthetic construct
GASSRAT

SEQ ID NO: 2411 - skipped

SEQ ID NO: 2412 - protein, 9 aa, synthetic construct
TGAVTSGNY

SEQ ID NO: 2413 - skipped

SEQ ID NO: 2414 - protein, 7 aa, synthetic construct
GFTFNKY

SEQ ID NO: 2415 - protein, 8 aa, synthetic construct
GFTFNKYA

SEQ ID NO: 2416 - protein, 8 aa, synthetic construct
RSKYNNYA

SEQ ID NO: 2417 - protein, 10 aa, synthetic construct
IRSKYNNYAT

SEQ ID NO: 2418 - protein, 16 aa, synthetic construct
VRHGNFGNSYISYWAY

SEQ ID NO: 2419 - protein, 261 aa, synthetic construct
MAVTACQGLGFVVSLIGIAGIIAATCMDQWSTQDLYNNPVTAVFNYQGLWRSCVRESSGFTECRGYFTLLGLPAMLQAVRALMIVGIVLGAIGLLVSIFALKCIRIGSMEDSAKANMTLTSGIMFIVSGLCAIAGVSVFANMLVTNFWMSTANMYTGMGGMVQTVQTRYTFGAALFVGWVAGGLTLIGGVMMCIACRGLAPEETNYKAVSYHASGHSVAYKPGGFKASTGFGSNTKNKKIYDGGARTEDEVQSYPSKHDYV

SEQ ID NO: 2420 - protein, 53 aa, synthetic construct
DQWSTQDLYNNPVTAVFNYQGLWRSCVRESSGFTECRGYFTLLGLPAMLQAVR

SEQ ID NO: 2421 - protein, 31 aa, synthetic construct
VTNFWMSTANMYTGMGGMVQTVQTRYTFGAA

SEQ ID NO: 2422 - protein, 5 aa, synthetic construct
GYYMH

SEQ ID NO: 2423 - protein, 7 aa, synthetic construct
GYTFTGY

SEQ ID NO: 2424 - protein, 8 aa, synthetic construct
GYTFTGYY

SEQ ID NO: 2425 - protein, 17 aa, synthetic construct
WINPNSGGTKYAQKFQG

SEQ ID NO: 2426 - protein, 6 aa, synthetic construct
NPNSGG

SEQ ID NO: 2427 - protein, 8 aa, synthetic construct
INPNSGGT

SEQ ID NO: 2428 - protein, 16 aa, synthetic construct
DRITVAGTYYYYGMDV

SEQ ID NO: 2429 - protein, 4 aa, synthetic construct
GGGG

SEQ ID NO: 2430 - protein, 18 aa, synthetic construct
ARDRITVAGTYYYYGMDV

SEQ ID NO: 2431 - protein, 11 aa, synthetic construct
RASQGVNNWLA

SEQ ID NO: 2432 - protein, 5 aa, synthetic construct
GGGGS

SEQ ID NO: 2433 - protein, 6 aa, synthetic construct
QGVNNW

SEQ ID NO: 2434 - protein, 7 aa, synthetic construct
TASSLQS

SEQ ID NO: 2435 - protein, 5 aa, synthetic construct
GGGGQ

SEQ ID NO: 2436 - skipped

SEQ ID NO: 2437 - protein, 9 aa, synthetic construct
QQANSFPIT

SEQ ID NO: 2438 - protein, 6 aa, synthetic construct
SGGGGS

SEQ ID NO: 2439 - protein, 6 aa, synthetic construct
PGGGGS

SEQ ID NO: 2440 - protein, 125 aa, synthetic construct
QVQLVQSGAEVKKPGASVKVSCKASGYTFTGYYMHWVRQAPGQCLEWMGWINPNSGGTKYAQKFQGRVTMTRDTSISTAYMELSRLRSDDTAVYYCARDRITVAGTYYYYGMDVWGQGTTVTVSS

SEQ ID NO: 2441 - protein, 107 aa, synthetic construct
DIQMTQSPSSVSASVGDRVTITCRASQGVNNWLAWYQQKPGKAPKLLIYTASSLQSGVPSRFSGSGSGTDFTLTIRSLQPEDFATYYCQQANSFPITFGCGTRLEIK

SEQ ID NO: 2442 - protein, 247 aa, synthetic construct
QVQLVQSGAEVKKPGASVKVSCKASGYTFTGYYMHWVRQAPGQCLEWMGWINPNSGGTKYAQKFQGRVTMTRDTSISTAYMELSRLRSDDTAVYYCARDRITVAGTYYYYGMDVWGQGTTVTVSSGGGGSGGGGSGGGGSDIQMTQSPSSVSASVGDRVTITCRASQGVNNWLAWYQQKPGKAPKLLIYTASSLQSGVPSRFSGSGSGTDFTLTIRSLQPEDFATYYCQQANSFPITFGCGTRLEIK

SEQ ID NO: 2443 - protein, 5 aa, synthetic construct
GYYMH

SEQ ID NO: 2444 - protein, 7 aa, synthetic construct
GYTFTGY

SEQ ID NO: 2445 - protein, 8 aa, synthetic construct
GYTFTGYY

SEQ ID NO: 2446 - protein, 17 aa, synthetic construct
WINPNSGGTKYAQKFQG

SEQ ID NO: 2447 - protein, 6 aa, synthetic construct
NPNSGG

SEQ ID NO: 2448 - protein, 8 aa, synthetic construct
INPNSGGT

SEQ ID NO: 2449 - protein, 6 aa, synthetic construct
PGGDGS

SEQ ID NO: 2450 - protein, 9 aa, synthetic construct
GGGGSGGGS

SEQ ID NO: 2451 - protein, 18 aa, synthetic construct
ARDRITVAGTYYYYGMDV

SEQ ID NO: 2452 - protein, 10 aa, synthetic construct
GGGGSGGGGS

SEQ ID NO: 2453 - protein, 15 aa, synthetic construct
GGGGSGGGGSGGGGS

SEQ ID NO: 2454 - protein, 6 aa, synthetic construct
QGVNNW

SEQ ID NO: 2455 - protein, 25 aa, synthetic construct
GGGGSGGGGSGGGGSGGGGSGGGGS

SEQ ID NO: 2456 - protein, 30 aa, synthetic construct
GGGGSGGGGSGGGGSGGGGSGGGGSGGGGS

SEQ ID NO: 2457 - protein, 35 aa, synthetic construct
GGGGSGGGGSGGGGSGGGGSGGGGSGGGGSGGGGS

SEQ ID NO: 2458 - protein, 40 aa, synthetic construct
GGGGSGGGGSGGGGSGGGGSGGGGSGGGGSGGGGSGGGGS

SEQ ID NO: 2459 - protein, 6 aa, synthetic construct
HHHHHH

SEQ ID NO: 2460 - protein, 502 aa, synthetic construct
QVQLVQSGAEVKKPGASVKVSCKASGYTFTGYYMHWVRQAPGQCLEWMGWINPNSGGTKYAQKFQGRVTMTRDTSISTAYMELSRLRSDDTAVYYCARDRITVAGTYYYYGMDVWGQGTTVTVSSGGGGSGGGGSGGGGSDIQMTQSPSSVSASVGDRVTITCRASQGVNNWLAWYQQKPGKAPKLLIYTASSLQSGVPSRFSGSGSGTDFTLTIRSLQPEDFATYYCQQANSFPITFGCGTRLEIKSGGGGSEVQLVESGGGLVQPGGSLKLSCAASGFTFNKYAMNWVRQAPGKGLEWVARIRSKYNNYATYYADSVKDRFTISRDDSKNTAYLQMNNLKTEDTAVYYCVRHGNFGNSYISYWAYWGQGTLVTVSSGGGGSGGGGSGGGGSQTVVTQEPSLTVSPGGTVTLTCGSSTGAVTSGNYPNWVQQKPGQAPRGLIGGTKFLAPGTPARFSGSLLGGKAALTLSGVQPEDEAEYYCVLWYSNRWVFGGGTKLTVL

SEQ ID NO: 2461 - protein, 125 aa, synthetic construct
QVQMVQSGAEVKKHGASVKVSCKASGYTFTGYYMHWVRQAPGQCLEWMGWINPNSGGTKYAQKFQGRVTMTRDTSISTAYMELSRLRSDDTAVYYCARDRITVAGTYYYYGMDVWGQGTTVTVSS

SEQ ID NO: 2462 - protein, 508 aa, synthetic construct
QVQLVQSGAEVKKPGASVKVSCKASGYTFTGYYMHWVRQAPGQCLEWMGWINPNSGGTKYAQKFQGRVTMTRDTSISTAYMELSRLRSDDTAVYYCARDRITVAGTYYYYGMDVWGQGTTVTVSSGGGGSGGGGSGGGGSDIQMTQSPSSVSASVGDRVTITCRASQGVNNWLAWYQQKPGKAPKLLIYTASSLQSGVPSRFSGSGSGTDFTLTIRSLQPEDFATYYCQQANSFPITFGCGTRLEIKSGGGGSEVQLVESGGGLVQPGGSLKLSCAASGFTFNKYAMNWVRQAPGKGLEWVARIRSKYNNYATYYADSVKDRFTISRDDSKNTAYLQMNNLKTEDTAVYYCVRHGNFGNSYISYWAYWGQGTLVTVSSGGGGSGGGGSGGGGSQTVVTQEPSLTVSPGGTVTLTCGSSTGAVTSGNYPNWVQQKPGQAPRGLIGGTKFLAPGTPARFSGSLLGGKAALTLSGVQPEDEAEYYCVLWYSNRWVFGGGTKLTVLHHHHHH

SEQ ID NO: 2463 - protein, 247 aa, synthetic construct
QVQMVQSGAEVKKHGASVKVSCKASGYTFTGYYMHWVRQAPGQCLEWMGWINPNSGGTKYAQKFQGRVTMTRDTSISTAYMELSRLRSDDTAVYYCARDRITVAGTYYYYGMDVWGQGTTVTVSSGGGGSGGGGSGGGGSDIQMTQSPSSVSASVGDRVTITCRASQGVNNWLAWYQQKPGKAPKLLIYTASSLQSGVPSRFSGSGSGTDFTLTIRSLQPEDFATYYCQQANSFPITFGCGTRLEIK

SEQ ID NO: 2464 - protein, 5 aa, synthetic construct
SYWIN

SEQ ID NO: 2465 - protein, 7 aa, synthetic construct
GYTFTSY

SEQ ID NO: 2466 - protein, 8 aa, synthetic construct
GYTFTSYW

SEQ ID NO: 2467 - protein, 17 aa, synthetic construct
NIYPSDSYTNYNQKFKD

SEQ ID NO: 2468 - protein, 6 aa, synthetic construct
YPSDSY

SEQ ID NO: 2469 - protein, 8 aa, synthetic construct
IYPSDSYT

SEQ ID NO: 2470 - protein, 9 aa, synthetic construct
SWRGNSFDY

SEQ ID NO: 2471 - protein, 990 aa, synthetic construct
QVQLVQSGAEVKKPGASVKVSCKASGYTFTGYYMHWVRQAPGQCLEWMGWINPNSGGTKYAQKFQGRVTMTRDTSISTAYMELSRLRSDDTAVYYCARDRITVAGTYYYYGMDVWGQGTTVTVSSGGGGSGGGGSGGGGSDIQMTQSPSSVSASVGDRVTITCRASQGVNNWLAWYQQKPGKAPKLLIYTASSLQSGVPSRFSGSGSGTDFTLTIRSLQPEDFATYYCQQANSFPITFGCGTRLEIKSGGGGSEVQLVESGGGLVQPGGSLKLSCAASGFTFNKYAMNWVRQAPGKGLEWVARIRSKYNNYATYYADSVKDRFTISRDDSKNTAYLQMNNLKTEDTAVYYCVRHGNFGNSYISYWAYWGQGTLVTVSSGGGGSGGGGSGGGGSQTVVTQEPSLTVSPGGTVTLTCGSSTGAVTSGNYPNWVQQKPGQAPRGLIGGTKFLAPGTPARFSGSLLGGKAALTLSGVQPEDEAEYYCVLWYSNRWVFGGGTKLTVLGGGGDKTHTCPPCPAPELLGGPSVFLFPPKPKDTLMISRTPEVTCVVVDVSHEDPEVKFNWYVDGVEVHNAKTKPCEEQYGSTYRCVSVLTVLHQDWLNGKEYKCKVSNKALPAPIEKTISKAKGQPREPQVYTLPPSREEMTKNQVSLTCLVKGFYPSDIAVEWESNGQPENNYKTTPPVLDSDGSFFLYSKLTVDKSRWQQGNVFSCSVMHEALHNHYTQKSLSLSPGKGGGGSGGGGSGGGGSGGGGSGGGGSGGGGSDKTHTCPPCPAPELLGGPSVFLFPPKPKDTLMISRTPEVTCVVVDVSHEDPEVKFNWYVDGVEVHNAKTKPCEEQYGSTYRCVSVLTVLHQDWLNGKEYKCKVSNKALPAPIEKTISKAKGQPREPQVYTLPPSREEMTKNQVSLTCLVKGFYPSDIAVEWESNGQPENNYKTTPPVLDSDGSFFLYSKLTVDKSRWQQGNVFSCSVMHEALHNHYTQKSLSLSPGK

SEQ ID NO: 2472 - protein, 11 aa, synthetic construct
TRSWRGNSFDY

SEQ ID NO: 2473 - protein, 17 aa, synthetic construct
KSSQSLLNSGNQKNYLT

SEQ ID NO: 2474 - protein, 502 aa, synthetic construct
QVQMVQSGAEVKKHGASVKVSCKASGYTFTGYYMHWVRQAPGQCLEWMGWINPNSGGTKYAQKFQGRVTMTRDTSISTAYMELSRLRSDDTAVYYCARDRITVAGTYYYYGMDVWGQGTTVTVSSGGGGSGGGGSGGGGSDIQMTQSPSSVSASVGDRVTITCRASQGVNNWLAWYQQKPGKAPKLLIYTASSLQSGVPSRFSGSGSGTDFTLTIRSLQPEDFATYYCQQANSFPITFGCGTRLEIKSGGGGSEVQLVESGGGLVQPGGSLKLSCAASGFTFNKYAMNWVRQAPGKGLEWVARIRSKYNNYATYYADSVKDRFTISRDDSKNTAYLQMNNLKTEDTAVYYCVRHGNFGNSYISYWAYWGQGTLVTVSSGGGGSGGGGSGGGGSQTVVTQEPSLTVSPGGTVTLTCGSSTGAVTSGNYPNWVQQKPGQAPRGLIGGTKFLAPGTPARFSGSLLGGKAALTLSGVQPEDEAEYYCVLWYSNRWVFGGGTKLTVL

SEQ ID NO: 2475 - protein, 12 aa, synthetic construct
QSLLNSGNQKNY

SEQ ID NO: 2476 - protein, 7 aa, synthetic construct
WASTRES

SEQ ID NO: 2477 - protein, 508 aa, synthetic construct
QVQMVQSGAEVKKHGASVKVSCKASGYTFTGYYMHWVRQAPGQCLEWMGWINPNSGGTKYAQKFQGRVTMTRDTSISTAYMELSRLRSDDTAVYYCARDRITVAGTYYYYGMDVWGQGTTVTVSSGGGGSGGGGSGGGGSDIQMTQSPSSVSASVGDRVTITCRASQGVNNWLAWYQQKPGKAPKLLIYTASSLQSGVPSRFSGSGSGTDFTLTIRSLQPEDFATYYCQQANSFPITFGCGTRLEIKSGGGGSEVQLVESGGGLVQPGGSLKLSCAASGFTFNKYAMNWVRQAPGKGLEWVARIRSKYNNYATYYADSVKDRFTISRDDSKNTAYLQMNNLKTEDTAVYYCVRHGNFGNSYISYWAYWGQGTLVTVSSGGGGSGGGGSGGGGSQTVVTQEPSLTVSPGGTVTLTCGSSTGAVTSGNYPNWVQQKPGQAPRGLIGGTKFLAPGTPARFSGSLLGGKAALTLSGVQPEDEAEYYCVLWYSNRWVFGGGTKLTVLHHHHHH

SEQ ID NO: 2478 - skipped

SEQ ID NO: 2479 - protein, 9 aa, synthetic construct
QNDYSYPFT

SEQ ID NO: 2480 - protein, 990 aa, synthetic construct
QVQMVQSGAEVKKHGASVKVSCKASGYTFTGYYMHWVRQAPGQCLEWMGWINPNSGGTKYAQKFQGRVTMTRDTSISTAYMELSRLRSDDTAVYYCARDRITVAGTYYYYGMDVWGQGTTVTVSSGGGGSGGGGSGGGGSDIQMTQSPSSVSASVGDRVTITCRASQGVNNWLAWYQQKPGKAPKLLIYTASSLQSGVPSRFSGSGSGTDFTLTIRSLQPEDFATYYCQQANSFPITFGCGTRLEIKSGGGGSEVQLVESGGGLVQPGGSLKLSCAASGFTFNKYAMNWVRQAPGKGLEWVARIRSKYNNYATYYADSVKDRFTISRDDSKNTAYLQMNNLKTEDTAVYYCVRHGNFGNSYISYWAYWGQGTLVTVSSGGGGSGGGGSGGGGSQTVVTQEPSLTVSPGGTVTLTCGSSTGAVTSGNYPNWVQQKPGQAPRGLIGGTKFLAPGTPARFSGSLLGGKAALTLSGVQPEDEAEYYCVLWYSNRWVFGGGTKLTVLGGGGDKTHTCPPCPAPELLGGPSVFLFPPKPKDTLMISRTPEVTCVVVDVSHEDPEVKFNWYVDGVEVHNAKTKPCEEQYGSTYRCVSVLTVLHQDWLNGKEYKCKVSNKALPAPIEKTISKAKGQPREPQVYTLPPSREEMTKNQVSLTCLVKGFYPSDIAVEWESNGQPENNYKTTPPVLDSDGSFFLYSKLTVDKSRWQQGNVFSCSVMHEALHNHYTQKSLSLSPGKGGGGSGGGGSGGGGSGGGGSGGGGSGGGGSDKTHTCPPCPAPELLGGPSVFLFPPKPKDTLMISRTPEVTCVVVDVSHEDPEVKFNWYVDGVEVHNAKTKPCEEQYGSTYRCVSVLTVLHQDWLNGKEYKCKVSNKALPAPIEKTISKAKGQPREPQVYTLPPSREEMTKNQVSLTCLVKGFYPSDIAVEWESNGQPENNYKTTPPVLDSDGSFFLYSKLTVDKSRWQQGNVFSCSVMHEALHNHYTQKSLSLSPGK

SEQ ID NO: 2481 - protein, 501 aa, synthetic construct
QVQLQQPGAELVRPGASVKLSCKASGYTFTSYWINWVKQRPGQGLEWIGNIYPSDSYTNYNQKFKDKATLTVDKSSSTAYMQLSSPTSEDSAVYYCTRSWRGNSFDYWGQGTTLTVSSGGGGSGGGGSGGGGSDIVMTQSPSSLTVTAGEKVTMSCKSSQSLLNSGNQKNYLTWYQQKPGQPPKLLIYWASTRESGVPDRFTGSGSGTDFTLTISSVQAEDLAVYYCQNDYSYPFTFGSGTKLEIKSGGGGSEVQLVESGGGLVQPGGSLKLSCAASGFTFNKYAMNWVRQAPGKGLEWVARIRSKYNNYATYYADSVKDRFTISRDDSKNTAYLQMNNLKTEDTAVYYCVRHGNFGNSYISYWAYWGQGTLVTVSSGGGGSGGGGSGGGGSQTVVTQEPSLTVSPGGTVTLTCGSSTGAVTSGNYPNWVQQKPGQAPRGLIGGTKFLAPGTPARFSGSLLGGKAALTLSGVQPEDEAEYYCVLWYSNRWVFGGGTKLTVL

SEQ ID NO: 2482 - protein, 118 aa, synthetic construct
QVQLQQPGAELVRPGASVKLSCKASGYTFTSYWINWVKQRPGQGLEWIGNIYPSDSYTNYNQKFKDKATLTVDKSSSTAYMQLSSPTSEDSAVYYCTRSWRGNSFDYWGQGTTLTVSS

SEQ ID NO: 2483 - protein, 113 aa, synthetic construct
DIVMTQSPSSLTVTAGEKVTMSCKSSQSLLNSGNQKNYLTWYQQKPGQPPKLLIYWASTRESGVPDRFTGSGSGTDFTLTISSVQAEDLAVYYCQNDYSYPFTFGSGTKLEIK

SEQ ID NO: 2484 - protein, 246 aa, synthetic construct
QVQLQQPGAELVRPGASVKLSCKASGYTFTSYWINWVKQRPGQGLEWIGNIYPSDSYTNYNQKFKDKATLTVDKSSSTAYMQLSSPTSEDSAVYYCTRSWRGNSFDYWGQGTTLTVSSGGGGSGGGGSGGGGSDIVMTQSPSSLTVTAGEKVTMSCKSSQSLLNSGNQKNYLTWYQQKPGQPPKLLIYWASTRESGVPDRFTGSGSGTDFTLTISSVQAEDLAVYYCQNDYSYPFTFGSGTKLEIK

SEQ ID NO: 2485 - protein, 5 aa, synthetic construct
NYGMN

SEQ ID NO: 2486 - protein, 7 aa, synthetic construct
GYTFTNY

SEQ ID NO: 2487 - protein, 8 aa, synthetic construct
GYTFTNYG

SEQ ID NO: 2488 - protein, 17 aa, synthetic construct
WINTNTGEPTYAEEFKG

SEQ ID NO: 2489 - protein, 6 aa, synthetic construct
NTNTGE

SEQ ID NO: 2490 - protein, 8 aa, synthetic construct
INTNTGEP

SEQ ID NO: 2491 - protein, 9 aa, synthetic construct
LGFGNAMDY

SEQ ID NO: 2492 - protein, 989 aa, synthetic construct
QVQLQQPGAELVRPGASVKLSCKASGYTFTSYWINWVKQRPGQGLEWIGNIYPSDSYTNYNQKFKDKATLTVDKSSSTAYMQLSSPTSEDSAVYYCTRSWRGNSFDYWGQGTTLTVSSGGGGSGGGGSGGGGSDIVMTQSPSSLTVTAGEKVTMSCKSSQSLLNSGNQKNYLTWYQQKPGQPPKLLIYWASTRESGVPDRFTGSGSGTDFTLTISSVQAEDLAVYYCQNDYSYPFTFGSGTKLEIKSGGGGSEVQLVESGGGLVQPGGSLKLSCAASGFTFNKYAMNWVRQAPGKGLEWVARIRSKYNNYATYYADSVKDRFTISRDDSKNTAYLQMNNLKTEDTAVYYCVRHGNFGNSYISYWAYWGQGTLVTVSSGGGGSGGGGSGGGGSQTVVTQEPSLTVSPGGTVTLTCGSSTGAVTSGNYPNWVQQKPGQAPRGLIGGTKFLAPGTPARFSGSLLGGKAALTLSGVQPEDEAEYYCVLWYSNRWVFGGGTKLTVLGGGGDKTHTCPPCPAPELLGGPSVFLFPPKPKDTLMISRTPEVTCVVVDVSHEDPEVKFNWYVDGVEVHNAKTKPCEEQYGSTYRCVSVLTVLHQDWLNGKEYKCKVSNKALPAPIEKTISKAKGQPREPQVYTLPPSREEMTKNQVSLTCLVKGFYPSDIAVEWESNGQPENNYKTTPPVLDSDGSFFLYSKLTVDKSRWQQGNVFSCSVMHEALHNHYTQKSLSLSPGKGGGGSGGGGSGGGGSGGGGSGGGGSGGGGSDKTHTCPPCPAPELLGGPSVFLFPPKPKDTLMISRTPEVTCVVVDVSHEDPEVKFNWYVDGVEVHNAKTKPCEEQYGSTYRCVSVLTVLHQDWLNGKEYKCKVSNKALPAPIEKTISKAKGQPREPQVYTLPPSREEMTKNQVSLTCLVKGFYPSDIAVEWESNGQPENNYKTTPPVLDSDGSFFLYSKLTVDKSRWQQGNVFSCSVMHEALHNHYTQKSLSLSPGK

SEQ ID NO: 2493 - protein, 11 aa, synthetic construct
ARLGFGNAMDY

SEQ ID NO: 2494 - protein, 17 aa, synthetic construct
KSSQSLLNSGNQKNYLT

SEQ ID NO: 2495 - protein, 501 aa, synthetic construct
QIQLVQSGPELKKPGETVKISCKASGYTFTNYGMNWVKQAPGKGLKWMGWINTNTGEPTYAEEFKGRFAFSLETSASTAYLQINNLKNEDTATYFCARLGFGNAMDYWGQGTSVTVSSGGGGSGGGGSGGGGSDIVMTQSPSSLTVTAGEKVTMSCKSSQSLLNSGNQKNYLTWYQQKPGQPPKLLIYWASTRESGVPDRFTGSGSGTDFTLTISSVQAEDLAVYYCQNDYSYPLTFGAGTKLELKSGGGGSEVQLVESGGGLVQPGGSLKLSCAASGFTFNKYAMNWVRQAPGKGLEWVARIRSKYNNYATYYADSVKDRFTISRDDSKNTAYLQMNNLKTEDTAVYYCVRHGNFGNSYISYWAYWGQGTLVTVSSGGGGSGGGGSGGGGSQTVVTQEPSLTVSPGGTVTLTCGSSTGAVTSGNYPNWVQQKPGQAPRGLIGGTKFLAPGTPARFSGSLLGGKAALTLSGVQPEDEAEYYCVLWYSNRWVFGGGTKLTVL

SEQ ID NO: 2496 - protein, 12 aa, synthetic construct
QSLLNSGNQKNY

SEQ ID NO: 2497 - protein, 7 aa, synthetic construct
WASTRES

SEQ ID NO: 2498 - protein, 989 aa, synthetic construct
QIQLVQSGPELKKPGETVKISCKASGYTFTNYGMNWVKQAPGKGLKWMGWINTNTGEPTYAEEFKGRFAFSLETSASTAYLQINNLKNEDTATYFCARLGFGNAMDYWGQGTSVTVSSGGGGSGGGGSGGGGSDIVMTQSPSSLTVTAGEKVTMSCKSSQSLLNSGNQKNYLTWYQQKPGQPPKLLIYWASTRESGVPDRFTGSGSGTDFTLTISSVQAEDLAVYYCQNDYSYPLTFGAGTKLELKSGGGGSEVQLVESGGGLVQPGGSLKLSCAASGFTFNKYAMNWVRQAPGKGLEWVARIRSKYNNYATYYADSVKDRFTISRDDSKNTAYLQMNNLKTEDTAVYYCVRHGNFGNSYISYWAYWGQGTLVTVSSGGGGSGGGGSGGGGSQTVVTQEPSLTVSPGGTVTLTCGSSTGAVTSGNYPNWVQQKPGQAPRGLIGGTKFLAPGTPARFSGSLLGGKAALTLSGVQPEDEAEYYCVLWYSNRWVFGGGTKLTVLGGGGDKTHTCPPCPAPELLGGPSVFLFPPKPKDTLMISRTPEVTCVVVDVSHEDPEVKFNWYVDGVEVHNAKTKPCEEQYGSTYRCVSVLTVLHQDWLNGKEYKCKVSNKALPAPIEKTISKAKGQPREPQVYTLPPSREEMTKNQVSLTCLVKGFYPSDIAVEWESNGQPENNYKTTPPVLDSDGSFFLYSKLTVDKSRWQQGNVFSCSVMHEALHNHYTQKSLSLSPGKGGGGSGGGGSGGGGSGGGGSGGGGSGGGGSDKTHTCPPCPAPELLGGPSVFLFPPKPKDTLMISRTPEVTCVVVDVSHEDPEVKFNWYVDGVEVHNAKTKPCEEQYGSTYRCVSVLTVLHQDWLNGKEYKCKVSNKALPAPIEKTISKAKGQPREPQVYTLPPSREEMTKNQVSLTCLVKGFYPSDIAVEWESNGQPENNYKTTPPVLDSDGSFFLYSKLTVDKSRWQQGNVFSCSVMHEALHNHYTQKSLSLSPGK

SEQ ID NO: 2499 - protein, 585 aa, synthetic construct [sequence omitted]

SEQ ID NO: 2500 - protein, 9 aa, synthetic construct
QNDYSYPLT

SEQ ID NO: 2501 - protein, 585 aa, synthetic construct
DAHKSEVAHRFKDLGEENFKALVLIAFAQYLQQCPFEDHVKLVNEVTEFAKTCVADESAENCDKSLHTLFGDKLCTVATLRETYGEMADCCAKQEPERNECFLQHKDDNPNLPRLVRPEVDVMCTAFHDNEETFLKKYLYEIARRHPYFYAPELLFFAKRYKAAFTECCQAADKAACLLPKLDELRDEGKASSAKQRLKCASLQKFGERAFKAWAVARLSQRFPKAEFAEVSKLVTDLTKVHTECCHGDLLECADDRADLAKYICENQDSISSKLKECCEKPLLEKSHCIAEVENDEMPADLPSLAADFVESKDVCKNYAEAKDVFLGMFLYEYARRHPDYSVVLLLRLAKTYETTLEKCCAAADPHECYAKVFDEFKPLVEEPQNLIKQNCELFEQLGEYKFQNALLVRYTKKVPQVSTPTLVEVSRNLGKVGSKCCKHPEAKRMPCAEDYLSVVLNQLCVLHEKTPVSDRVTKCCTESLVNRRPCFSALEVDETYVPKEFNAGTFTFHADICTLSEKERQIKKQTALVELVKHKPKATKEQLKAAMDDFAAFVEKCCKADDKETCFAEEGKKLVAASQAALGL

SEQ ID NO: 2502 - protein, 585 aa, synthetic construct
DAHKSEVAHRFKDLGEENFKALVLIAFAQYLQQCPFEDHVKLVNEVTEFAKTCVADESAENCDKSLHTLFGDKLCTVATLRETYGEMADCCAKQEPERNECFLQHKDDNPNLPRLVRPEVDVMCTAFHDNEETFLKKYLYEIARRHPYFYAPELLFFAKRYKAAFTECCQAADKAACLLPKLDELRDEGKASSAKQRLKCASLQKFGERAFKAWAVARLSQRFPKAEFAEVSKLVTDLTKVHTECCHGDLLECADDRADLAKYICENQDSISSKLKECCEKPLLEKSHCIAEVENDEMPADLPSLAADFVESKDVCKNYAEAKDVFLGMFLYEYARRHPDYSVVLLLRLAKTYETTLEKCCAAADPHECYAKVFDEFKPLVEEPQNLIKQNCELFEQLGEYKFQNALLVRYTKKVPQVSTPTLVEVSRNLGKVGSKCCKHPEAKRMPCAEDYLSVVLNQLCVLHEKTPVSDRVTKCCTESLVNRRPCFSALEVDETYVPKEFNAETFTFHADICTLSEKERQIKKQTALVELVKHKPKATKEQLKAVMDDFAAFVEKCCKADDKETCFAEEGPKLVAASQAALGL

SEQ ID NO: 2503 - protein, 118 aa, synthetic construct
QIQLVQSGPELKKPGETVKISCKASGYTFTNYGMNWVKQAPGKGLKWMGWINTNTGEPTYAEEFKGRFAFSLETSASTAYLQINNLKNEDTATYFCARLGFGNAMDYWGQGTSVTVSS

SEQ ID NO: 2504 - protein, 113 aa, synthetic construct
DIVMTQSPSSLTVTAGEKVTMSCKSSQSLLNSGNQKNYLTWYQQKPGQPPKLLIYWASTRESGVPDRFTGSGSGTDFTLTISSVQAEDLAVYYCQNDYSYPLTFGAGTKLELK

SEQ ID NO: 2505 - protein, 246 aa, synthetic construct
QIQLVQSGPELKKPGETVKISCKASGYTFTNYGMNWVKQAPGKGLKWMGWINTNTGEPTYAEEFKGRFAFSLETSASTAYLQINNLKNEDTATYFCARLGFGNAMDYWGQGTSVTVSSGGGGSGGGGSGGGGSDIVMTQSPSSLTVTAGEKVTMSCKSSQSLLNSGNQKNYLTWYQQKPGQPPKLLIYWASTRESGVPDRFTGSGSGTDFTLTISSVQAEDLAVYYCQNDYSYPLTFGAGTKLELK

SEQ ID NO: 2506 - protein, 585 aa, synthetic construct
DAHKSEVAHRFKDLGEENFKALVLIAFAQYLQQCPFEDHVKLVNEVTEFAKTCVADESAENCDKSLHTLFGDKLCTVATLRETYGEMADCCAKQEPERNECFLQHKDDNPNLPRLVRPEVDVMCTAFHDNEETFLKKYLYEIARRHPYFYAPELLFFAKRYKAAFTECCQAADKAACLLPKLDELRDEGKASSAKQRLKCASLQKFGERAFKAWAVARLSQRFPKAEFAEVSKLVTDLTKVHTECCHGDLLECADDRADLAKYICENQDSISSKLKECCEKPLLEKSHCIAEVENDEMPADLPSLAADFVESKDVCKNYAEAKDVFLGMFLYEYARRHPDYSVVLLLRLAKTYETTLEKCCAAADPHECYAKVFDEFKPLVEEPQNLIKQNCELFEQLGEYKFQNALLVRYTKKVPQVSTPTLVEVSRNLGKVGSKCCKHPEAKRMPCAEDYLSVVLNQLCVLHEKTPVSDRVTKCCTESLVNRRPCFSALDVDETYVPKEFNAETFTFHADICTLSEKERQIKKQTALVELVKHKPKATKEQLKAVMDDFAAFVEKCCKADDKETCFAEEGPHLVAASKAALGL

SEQ ID NO: 2507 - protein, 585 aa, synthetic construct
DAHKSEVAHRFKDLGEENFKALVLIAFAQYLQQCPFEDHVKLVNEVTEFAKTCVADESAENCDKSLHTLFGDKLCTVATLRETYGEMADCCAKQEPERNECFLQHKDDNPNLPRLVRPEVDVMCTAFHDNEETFLKKYLYEIARRHPYFYAPELLFFAKRYKAAFTECCQAADKAACLLPKLDELRDEGKASSAKQRLKCASLQKFGERAFKAWAVARLSQRFPKAEFAEVSKLVTDLTKVHTECCHGDLLECADDRADLAKYICENQDSISSKLKECCEKPLLEKSHCIAEVENDEMPADLPSLAADFVESKDVCKNYAEAKDVFLGMFLYEYARRHPDYSVVLLLRLAKTYETTLEKCCAAADPHECYAKVFDEFKPLVEEPQNLIKQNCELFEQLGEYKFQNALLVRYTKKVPQVSTPTLVEVSRNLGKVGSKCCKHPEAKRMPCAEDYLSVVLNQLCVLHEKTPVSDRVTKCCTESLVNRRPCFSALGVDETYVPKEFNAETFTFHADICTLSEKERQIKKQTALVELVKHKPKATKEQLKAVMDKFAAFVEKCCKADDKETCFAEEGPKLVAASQAALGL

SEQ ID NO: 2508 - protein, 585 aa, synthetic construct
DAHKSEVAHRFKDLGEENFKALVLIAFAQYLQQCPFEDHVKLVNEVTEFAKTCVADESAENCDKSLHTLFGDKLCTVATLRETYGEMADCCAKQEPERNECFLQHKDDNPNLPRLVRPEVDVMCTAFHDNEETFLKKYLYEIARRHPYFYAPELLFFAKRYKAAFTECCQAADKAACLLPKLDELRDEGKASSAKQRLKCASLQKFGERAFKAWAVARLSQRFPKAEFAEVSKLVTDLTKVHTECCHGDLLECADDRADLAKYICENQDSISSKLKECCEKPLLEKSHCIAEVENDEMPADLPSLAADFVESKDVCKNYAEAKDVFLGMFLYEYARRHPDYSVVLLLRLAKTYETTLEKCCAAADPHECYAKVFDEFKPLVEEPQNLIKQNCELFEQLGEYKFQNALLVRYTKKVPQVSTPTLVEVSRNLGKVGSKCCKHPEAKRMPCAEDYLSVVLNQLCVLHEKTPVSDRVTKCCTESLVNRRPCFSALDVDETYVPKEFNAETFTFHADICTLSEKERQIKKQTALVELVKHKPKATKEQLKAVMDKFAAFVEKCCKADDKETCFAEEGPKLVAASQAALGL

SEQ ID NO: 2509 - protein, 585 aa, synthetic construct
DAHKSEVAHRFKDLGEENFKALVLIAFAQYLQQCPFEDHVKLVNEVTEFAKTCVADESAENCDKSLHTLFGDKLCTVATLRETYGEMADCCAKQEPERNECFLQHKDDNPNLPRLVRPEVDVMCTAFHDNEETFLKKYLYEIARRHPYFYAPELLFFAKRYKAAFTECCQAADKAACLLPKLDELRDEGKASSAKQRLKCASLQKFGERAFKAWAVARLSQRFPKAEFAEVSKLVTDLTKVHTECCHGDLLECADDRADLAKYICENQDSISSKLKECCEKPLLEKSHCIAEVENDEMPADLPSLAADFVESKDVCKNYAEAKDVFLGMFLYEYARRHPDYSVVLLLRLAKTYETTLEKCCAAADPHECYAKVFDEFKPLVEEPQNLIKQNCELFEQLGEYKFQNALLVRYTKKVPQVSTPTLVEVSRNLGKVGSKCCKHPEAKRMPCAEDYLSVVLNQLCVLHEKTPVSDRVTKCCTESLVNRRPCFSALEVDETYVPKEFNAETFTFHADICTLSEKERQIKKQTALVELVKHKPKATKEQLKAVMDKFAAFVEKCCKADDKETCFAEEGPHLVAASQAALGL

SEQ ID NO: 2510 - protein, 585 aa, synthetic construct
DAHKSEVAHRFKDLGEENFKALVLIAFAQYLQQCPFEDHVKLVNEVTEFAKTCVADESAENCDKSLHTLFGDKLCTVATLRETYGEMADCCAKQEPERNECFLQHKDDNPNLPRLVRPEVDVMCTAFHDNEETFLKKYLYEIARRHPYFYAPELLFFAKRYKAAFTECCQAADKAACLLPKLDELRDEGKASSAKQRLKCASLQKFGERAFKAWAVARLSQRFPKAEFAEVSKLVTDLTKVHTECCHGDLLECADDRADLAKYICENQDSISSKLKECCEKPLLEKSHCIAEVENDEMPADLPSLAADFVESKDVCKNYAEAKDVFLGMFLYEYARRHPDYSVVLLLRLAKTYETTLEKCCAAADPHECYAKVFDEFKPLVEEPQNLIKQNCELFEQLGEYKFQNALLVRYTKKVPQVSTPTLVEVSRNLGKVGSKCCKHPEAKRMPCAEDYLSVVLNQLCVLHEKTPVSDRVTKCCTESLVNRRPCFSALEVDETYVPKEFNAETFTFHADICTLSEKERQIKKQTALVELVKHKPKATKEQLKAVMDDFAAFVEKCCKADDKETCFAEEGPHLVAASKAALGL

SEQ ID NO: 2511 - protein, 585 aa, synthetic construct
DAHKSEVAHRFKDLGEENFKALVLIAFAQYLQQCPFEDHVKLVNEVTEFAKTCVADESAENCDKSLHTLFGDKLCTVATLRETYGEMADCCAKQEPERNECFLQHKDDNPNLPRLVRPEVDVMCTAFHDNEETFLKKYLYEIARRHPYFYAPELLFFAKRYKAAFTECCQAADKAACLLPKLDELRDEGKASSAKQRLKCASLQKFGERAFKAWAVARLSQRFPKAEFAEVSKLVTDLTKVHTECCHGDLLECADDRADLAKYICENQDSISSKLKECCEKPLLEKSHCIAEVENDEMPADLPSLAADFVESKDVCKNYAEAKDVFLGMFLYEYARRHPDYSVVLLLRLAKTYETTLEKCCAAADPHECYAKVFDEFKPLVEEPQNLIKQNCELFEQLGEYKFQNALLVRYTKKVPQVSTPTLVEVSRNLGKVGSKCCKHPEAKRMPCAEDYLSVVLNQLCVLHEKTPVSDRVTKCCTESLVNRRPCFSALEVDETYVPKEFNAETFTFHADICTLSEKERQIKKQTALVELVKHKPKATKEQLKAVMDKFAAFVEKCCKADDKETCFAEEGPKLVAASKAALGL

SEQ ID NO: 2512 - protein, 585 aa, synthetic construct
DAHKSEVAHRFKDLGEENFKALVLIAFAQYLQQCPFEDHVKLVNEVTEFAKTCVADESAENCDKSLHTLFGDKLCTVATLRETYGEMADCCAKQEPERNECFLQHKDDNPNLPRLVRPEVDVMCTAFHDNEETFLKKYLYEIARRHPYFYAPELLFFAKRYKAAFTECCQAADKAACLLPKLDELRDEGKASSAKQRLKCASLQKFGERAFKAWAVARLSQRFPKAEFAEVSKLVTDLTKVHTECCHGDLLECADDRADLAKYICENQDSISSKLKECCEKPLLEKSHCIAEVENDEMPADLPSLAADFVESKDVCKNYAEAKDVFLGMFLYEYARRHPDYSVVLLLRLAKTYETTLEKCCAAADPHECYAKVFDEFKPLVEEPQNLIKQNCELFEQLGEYKFQNALLVRYTKKVPQVSTPTLVEVSRNLGKVGSKCCKHPEAKRMPCAEDYLSVVLNQLCVLHEKTPVSDRVTKCCTESLVNRRPCFSALDVDETYVPKEFNAETFTFHADICTLSEKERQIKKQTALVELVKHKPKATKEQLKAVMDDFAAFVEKCCKADDKETCFAEEGPKLVAASKAALGL

SEQ ID NO: 2513 - protein, 585 aa, synthetic construct
DAHKSEVAHRFKDLGEENFKALVLIAFAQYLQQSPFEDHVKLVNEVTEFAKTCVADESAENCDKSLHTLFGDKLCTVATLRETYGEMADCCAKQEPERNECFLQHKDDNPNLPRLVRPEVDVMCTAFHDNEETFLKKYLYEIARRHPYFYAPELLFFAKRYKAAFTECCQAADKAACLLPKLDELRDEGKASSAKQRLKCASLQKFGERAFKAWAVARLSQRFPKAEFAEVSKLVTDLTKVHTECCHGDLLECADDRADLAKYICENQDSISSKLKECCEKPLLEKSHCIAEVENDEMPADLPSLAADFVESKDVCKNYAEAKDVFLGMFLYEYARRHPDYSVVLLLRLAKTYETTLEKCCAAADPHECYAKVFDEFKPLVEEPQNLIKQNCELFEQLGEYKFQNALLVRYTKKVPQVSTPTLVEVSRNLGKVGSKCCKHPEAKRMPCAEDYLSVVLNQLCVLHEKTPVSDRVTKCCTESLVNRRPCFSALEVDETYVPKEFNAETFTFHADICTLSEKERQIKKQTALVELVKHKPKATKEQLKAVMDDFAAFVEKCCKADDKETCFAEEGKKLVAASQAALGL

SEQ ID NO: 2514 - protein, 585 aa, synthetic construct
DAHKSEVAHRFKDLGEENFKALVLIAFAQYLQQSPFEDHVKLVNEVTEFAKTCVADESAENCDKSLHTLFGDKLCTVATLRETYGEMADCCAKQEPERNECFLQHKDDNPNLPRLVRPEVDVMCTAFHDNEETFLKKYLYEIARRHPYFYAPELLFFAKRYKAAFTECCQAADKAACLLPKLDELRDEGKASSAKQRLKCASLQKFGERAFKAWAVARLSQRFPKAEFAEVSKLVTDLTKVHTECCHGDLLECADDRADLAKYICENQDSISSKLKECCEKPLLEKSHCIAEVENDEMPADLPSLAADFVESKDVCKNYAEAKDVFLGMFLYEYARRHPDYSVVLLLRLAKTYETTLEKCCAAADPHECYAKVFDEFKPLVEEPQNLIKQNCELFEQLGEYKFQNALLVRYTKKVPQVSTPTLVEVSRNLGKVGSKCCKHPEAKRMPCAEDYLSVVLNQLCVLHEKTPVSDRVTKCCTESLVNRRPCFSALEVDETYVPKEFNAGTFTFHADICTLSEKERQIKKQTALVELVKHKPKATKEQLKAAMDDFAAFVEKCCKADDKETCFAEEGKKLVAASQAALGL

SEQ ID NO: 2515 - protein, 585 aa, synthetic construct
DAHKSEVAHRFKDLGEENFKALVLIAFAQYLQQSPFEDHVKLVNEVTEFAKTCVADESAENCDKSLHTLFGDKLCTVATLRETYGEMADCCAKQEPERNECFLQHKDDNPNLPRLVRPEVDVMCTAFHDNEETFLKKYLYEIARRHPYFYAPELLFFAKRYKAAFTECCQAADKAACLLPKLDELRDEGKASSAKQRLKCASLQKFGERAFKAWAVARLSQRFPKAEFAEVSKLVTDLTKVHTECCHGDLLECADDRADLAKYICENQDSISSKLKECCEKPLLEKSHCIAEVENDEMPADLPSLAADFVESKDVCKNYAEAKDVFLGMFLYEYARRHPDYSVVLLLRLAKTYETTLEKCCAAADPHECYAKVFDEFKPLVEEPQNLIKQNCELFEQLGEYKFQNALLVRYTKKVPQVSTPTLVEVSRNLGKVGSKCCKHPEAKRMPCAEDYLSVVLNQLCVLHEKTPVSDRVTKCCTESLVNRRPCFSALEVDETYVPKEFNAETFTFHADICTLSEKERQIKKQTALVELVKHKPKATKEQLKAVMDDFAAFVEKCCKADDKETCFAEEGPKLVAASQAALGL

SEQ ID NO: 2516 - protein, 585 aa, synthetic construct
DAHKSEVAHRFKDLGEENFKALVLIAFAQYLQQSPFEDHVKLVNEVTEFAKTCVADESAENCDKSLHTLFGDKLCTVATLRETYGEMADCCAKQEPERNECFLQHKDDNPNLPRLVRPEVDVMCTAFHDNEETFLKKYLYEIARRHPYFYAPELLFFAKRYKAAFTECCQAADKAACLLPKLDELRDEGKASSAKQRLKCASLQKFGERAFKAWAVARLSQRFPKAEFAEVSKLVTDLTKVHTECCHGDLLECADDRADLAKYICENQDSISSKLKECCEKPLLEKSHCIAEVENDEMPADLPSLAADFVESKDVCKNYAEAKDVFLGMFLYEYARRHPDYSVVLLLRLAKTYETTLEKCCAAADPHECYAKVFDEFKPLVEEPQNLIKQNCELFEQLGEYKFQNALLVRYTKKVPQVSTPTLVEVSRNLGKVGSKCCKHPEAKRMPCAEDYLSVVLNQLCVLHEKTPVSDRVTKCCTESLVNRRPCFSALDVDETYVPKEFNAETFTFHADICTLSEKERQIKKQTALVELVKHKPKATKEQLKAVMDDFAAFVEKCCKADDKETCFAEEGPHLVAASKAALGL

SEQ ID NO: 2517 - protein, 585 aa, synthetic construct
DAHKSEVAHRFKDLGEENFKALVLIAFAQYLQQSPFEDHVKLVNEVTEFAKTCVADESAENCDKSLHTLFGDKLCTVATLRETYGEMADCCAKQEPERNECFLQHKDDNPNLPRLVRPEVDVMCTAFHDNEETFLKKYLYEIARRHPYFYAPELLFFAKRYKAAFTECCQAADKAACLLPKLDELRDEGKASSAKQRLKCASLQKFGERAFKAWAVARLSQRFPKAEFAEVSKLVTDLTKVHTECCHGDLLECADDRADLAKYICENQDSISSKLKECCEKPLLEKSHCIAEVENDEMPADLPSLAADFVESKDVCKNYAEAKDVFLGMFLYEYARRHPDYSVVLLLRLAKTYETTLEKCCAAADPHECYAKVFDEFKPLVEEPQNLIKQNCELFEQLGEYKFQNALLVRYTKKVPQVSTPTLVEVSRNLGKVGSKCCKHPEAKRMPCAEDYLSVVLNQLCVLHEKTPVSDRVTKCCTESLVNRRPCFSALGVDETYVPKEFNAETFTFHADICTLSEKERQIKKQTALVELVKHKPKATKEQLKAVMDKFAAFVEKCCKADDKETCFAEEGPKLVAASQAALGL

SEQ ID NO: 2518 - protein, 585 aa, synthetic construct
DAHKSEVAHRFKDLGEENFKALVLIAFAQYLQQSPFEDHVKLVNEVTEFAKTCVADESAENCDKSLHTLFGDKLCTVATLRETYGEMADCCAKQEPERNECFLQHKDDNPNLPRLVRPEVDVMCTAFHDNEETFLKKYLYEIARRHPYFYAPELLFFAKRYKAAFTECCQAADKAACLLPKLDELRDEGKASSAKQRLKCASLQKFGERAFKAWAVARLSQRFPKAEFAEVSKLVTDLTKVHTECCHGDLLECADDRADLAKYICENQDSISSKLKECCEKPLLEKSHCIAEVENDEMPADLPSLAADFVESKDVCKNYAEAKDVFLGMFLYEYARRHPDYSVVLLLRLAKTYETTLEKCCAAADPHECYAKVFDEFKPLVEEPQNLIKQNCELFEQLGEYKFQNALLVRYTKKVPQVSTPTLVEVSRNLGKVGSKCCKHPEAKRMPCAEDYLSVVLNQLCVLHEKTPVSDRVTKCCTESLVNRRPCFSALDVDETYVPKEFNAETFTFHADICTLSEKERQIKKQTALVELVKHKPKATKEQLKAVMDKFAAFVEKCCKADDKETCFAEEGPKLVAASQAALGL

SEQ ID NO: 2519 - protein, 585 aa, synthetic construct
DAHKSEVAHRFKDLGEENFKALVLIAFAQYLQQSPFEDHVKLVNEVTEFAKTCVADESAENCDKSLHTLFGDKLCTVATLRETYGEMADCCAKQEPERNECFLQHKDDNPNLPRLVRPEVDVMCTAFHDNEETFLKKYLYEIARRHPYFYAPELLFFAKRYKAAFTECCQAADKAACLLPKLDELRDEGKASSAKQRLKCASLQKFGERAFKAWAVARLSQRFPKAEFAEVSKLVTDLTKVHTECCHGDLLECADDRADLAKYICENQDSISSKLKECCEKPLLEKSHCIAEVENDEMPADLPSLAADFVESKDVCKNYAEAKDVFLGMFLYEYARRHPDYSVVLLLRLAKTYETTLEKCCAAADPHECYAKVFDEFKPLVEEPQNLIKQNCELFEQLGEYKFQNALLVRYTKKVPQVSTPTLVEVSRNLGKVGSKCCKHPEAKRMPCAEDYLSVVLNQLCVLHEKTPVSDRVTKCCTESLVNRRPCFSALEVDETYVPKEFNAETFTFHADICTLSEKERQIKKQTALVELVKHKPKATKEQLKAVMDKFAAFVEKCCKADDKETCFAEEGPHLVAASQAALGL

SEQ ID NO: 2520 - protein, 585 aa, synthetic construct
DAHKSEVAHRFKDLGEENFKALVLIAFAQYLQQSPFEDHVKLVNEVTEFAKTCVADESAENCDKSLHTLFGDKLCTVATLRETYGEMADCCAKQEPERNECFLQHKDDNPNLPRLVRPEVDVMCTAFHDNEETFLKKYLYEIARRHPYFYAPELLFFAKRYKAAFTECCQAADKAACLLPKLDELRDEGKASSAKQRLKCASLQKFGERAFKAWAVARLSQRFPKAEFAEVSKLVTDLTKVHTECCHGDLLECADDRADLAKYICENQDSISSKLKECCEKPLLEKSHCIAEVENDEMPADLPSLAADFVESKDVCKNYAEAKDVFLGMFLYEYARRHPDYSVVLLLRLAKTYETTLEKCCAAADPHECYAKVFDEFKPLVEEPQNLIKQNCELFEQLGEYKFQNALLVRYTKKVPQVSTPTLVEVSRNLGKVGSKCCKHPEAKRMPCAEDYLSVVLNQLCVLHEKTPVSDRVTKCCTESLVNRRPCFSALEVDETYVPKEFNAETFTFHADICTLSEKERQIKKQTALVELVKHKPKATKEQLKAVMDDFAAFVEKCCKADDKETCFAEEGPHLVAASKAALGL

SEQ ID NO: 2521 - protein, 585 aa, synthetic construct
DAHKSEVAHRFKDLGEENFKALVLIAFAQYLQQSPFEDHVKLVNEVTEFAKTCVADESAENCDKSLHTLFGDKLCTVATLRETYGEMADCCAKQEPERNECFLQHKDDNPNLPRLVRPEVDVMCTAFHDNEETFLKKYLYEIARRHPYFYAPELLFFAKRYKAAFTECCQAADKAACLLPKLDELRDEGKASSAKQRLKCASLQKFGERAFKAWAVARLSQRFPKAEFAEVSKLVTDLTKVHTECCHGDLLECADDRADLAKYICENQDSISSKLKECCEKPLLEKSHCIAEVENDEMPADLPSLAADFVESKDVCKNYAEAKDVFLGMFLYEYARRHPDYSVVLLLRLAKTYETTLEKCCAAADPHECYAKVFDEFKPLVEEPQNLIKQNCELFEQLGEYKFQNALLVRYTKKVPQVSTPTLVEVSRNLGKVGSKCCKHPEAKRMPCAEDYLSVVLNQLCVLHEKTPVSDRVTKCCTESLVNRRPCFSALEVDETYVPKEFNAETFTFHADICTLSEKERQIKKQTALVELVKHKPKATKEQLKAVMDKFAAFVEKCCKADDKETCFAEEGPKLVAASKAALGL

SEQ ID NO: 2522 - protein, 585 aa, synthetic construct
DAHKSEVAHRFKDLGEENFKALVLIAFAQYLQQSPFEDHVKLVNEVTEFAKTCVADESAENCDKSLHTLFGDKLCTVATLRETYGEMADCCAKQEPERNECFLQHKDDNPNLPRLVRPEVDVMCTAFHDNEETFLKKYLYEIARRHPYFYAPELLFFAKRYKAAFTECCQAADKAACLLPKLDELRDEGKASSAKQRLKCASLQKFGERAFKAWAVARLSQRFPKAEFAEVSKLVTDLTKVHTECCHGDLLECADDRADLAKYICENQDSISSKLKECCEKPLLEKSHCIAEVENDEMPADLPSLAADFVESKDVCKNYAEAKDVFLGMFLYEYARRHPDYSVVLLLRLAKTYETTLEKCCAAADPHECYAKVFDEFKPLVEEPQNLIKQNCELFEQLGEYKFQNALLVRYTKKVPQVSTPTLVEVSRNLGKVGSKCCKHPEAKRMPCAEDYLSVVLNQLCVLHEKTPVSDRVTKCCTESLVNRRPCFSALDVDETYVPKEFNAETFTFHADICTLSEKERQIKKQTALVELVKHKPKATKEQLKAVMDDFAAFVEKCCKADDKETCFAEEGPKLVAASKAALGL

SEQ ID NO: 2523 - protein, 585 aa, synthetic construct
DAHKSEVAHRFKDLGEENFKALVLIAFAQYLQQAPFEDHVKLVNEVTEFAKTCVADESAENCDKSLHTLFGDKLCTVATLRETYGEMADCCAKQEPERNECFLQHKDDNPNLPRLVRPEVDVMCTAFHDNEETFLKKYLYEIARRHPYFYAPELLFFAKRYKAAFTECCQAADKAACLLPKLDELRDEGKASSAKQRLKCASLQKFGERAFKAWAVARLSQRFPKAEFAEVSKLVTDLTKVHTECCHGDLLECADDRADLAKYICENQDSISSKLKECCEKPLLEKSHCIAEVENDEMPADLPSLAADFVESKDVCKNYAEAKDVFLGMFLYEYARRHPDYSVVLLLRLAKTYETTLEKCCAAADPHECYAKVFDEFKPLVEEPQNLIKQNCELFEQLGEYKFQNALLVRYTKKVPQVSTPTLVEVSRNLGKVGSKCCKHPEAKRMPCAEDYLSVVLNQLCVLHEKTPVSDRVTKCCTESLVNRRPCFSALEVDETYVPKEFNAETFTFHADICTLSEKERQIKKQTALVELVKHKPKATKEQLKAVMDDFAAFVEKCCKADDKETCFAEEGKKLVAASQAALGL

SEQ ID NO: 2524 - protein, 585 aa, synthetic construct
DAHKSEVAHRFKDLGEENFKALVLIAFAQYLQQAPFEDHVKLVNEVTEFAKTCVADESAENCDKSLHTLFGDKLCTVATLRETYGEMADCCAKQEPERNECFLQHKDDNPNLPRLVRPEVDVMCTAFHDNEETFLKKYLYEIARRHPYFYAPELLFFAKRYKAAFTECCQAADKAACLLPKLDELRDEGKASSAKQRLKCASLQKFGERAFKAWAVARLSQRFPKAEFAEVSKLVTDLTKVHTECCHGDLLECADDRADLAKYICENQDSISSKLKECCEKPLLEKSHCIAEVENDEMPADLPSLAADFVESKDVCKNYAEAKDVFLGMFLYEYARRHPDYSVVLLLRLAKTYETTLEKCCAAADPHECYAKVFDEFKPLVEEPQNLIKQNCELFEQLGEYKFQNALLVRYTKKVPQVSTPTLVEVSRNLGKVGSKCCKHPEAKRMPCAEDYLSVVLNQLCVLHEKTPVSDRVTKCCTESLVNRRPCFSALEVDETYVPKEFNAGTFTFHADICTLSEKERQIKKQTALVELVKHKPKATKEQLKAAMDDFAAFVEKCCKADDKETCFAEEGKKLVAASQAALGL

SEQ ID NO: 2525 - protein, 585 aa, synthetic construct
DAHKSEVAHRFKDLGEENFKALVLIAFAQYLQQAPFEDHVKLVNEVTEFAKTCVADESAENCDKSLHTLFGDKLCTVATLRETYGEMADCCAKQEPERNECFLQHKDDNPNLPRLVRPEVDVMCTAFHDNEETFLKKYLYEIARRHPYFYAPELLFFAKRYKAAFTECCQAADKAACLLPKLDELRDEGKASSAKQRLKCASLQKFGERAFKAWAVARLSQRFPKAEFAEVSKLVTDLTKVHTECCHGDLLECADDRADLAKYICENQDSISSKLKECCEKPLLEKSHCIAEVENDEMPADLPSLAADFVESKDVCKNYAEAKDVFLGMFLYEYARRHPDYSVVLLLRLAKTYETTLEKCCAAADPHECYAKVFDEFKPLVEEPQNLIKQNCELFEQLGEYKFQNALLVRYTKKVPQVSTPTLVEVSRNLGKVGSKCCKHPEAKRMPCAEDYLSVVLNQLCVLHEKTPVSDRVTKCCTESLVNRRPCFSALEVDETYVPKEFNAETFTFHADICTLSEKERQIKKQTALVELVKHKPKATKEQLKAVMDDFAAFVEKCCKADDKETCFAEEGPKLVAASQAALGL

SEQ ID NO: 2526 - protein, 585 aa, synthetic construct
DAHKSEVAHRFKDLGEENFKALVLIAFAQYLQQAPFEDHVKLVNEVTEFAKTCVADESAENCDKSLHTLFGDKLCTVATLRETYGEMADCCAKQEPERNECFLQHKDDNPNLPRLVRPEVDVMCTAFHDNEETFLKKYLYEIARRHPYFYAPELLFFAKRYKAAFTECCQAADKAACLLPKLDELRDEGKASSAKQRLKCASLQKFGERAFKAWAVARLSQRFPKAEFAEVSKLVTDLTKVHTECCHGDLLECADDRADLAKYICENQDSISSKLKECCEKPLLEKSHCIAEVENDEMPADLPSLAADFVESKDVCKNYAEAKDVFLGMFLYEYARRHPDYSVVLLLRLAKTYETTLEKCCAAADPHECYAKVFDEFKPLVEEPQNLIKQNCELFEQLGEYKFQNALLVRYTKKVPQVSTPTLVEVSRNLGKVGSKCCKHPEAKRMPCAEDYLSVVLNQLCVLHEKTPVSDRVTKCCTESLVNRRPCFSALDVDETYVPKEFNAETFTFHADICTLSEKERQIKKQTALVELVKHKPKATKEQLKAVMDDFAAFVEKCCKADDKETCFAEEGPHLVAASKAALGL

SEQ ID NO: 2527 - protein, 585 aa, synthetic construct
DAHKSEVAHRFKDLGEENFKALVLIAFAQYLQQAPFEDHVKLVNEVTEFAKTCVADESAENCDKSLHTLFGDKLCTVATLRETYGEMADCCAKQEPERNECFLQHKDDNPNLPRLVRPEVDVMCTAFHDNEETFLKKYLYEIARRHPYFYAPELLFFAKRYKAAFTECCQAADKAACLLPKLDELRDEGKASSAKQRLKCASLQKFGERAFKAWAVARLSQRFPKAEFAEVSKLVTDLTKVHTECCHGDLLECADDRADLAKYICENQDSISSKLKECCEKPLLEKSHCIAEVENDEMPADLPSLAADFVESKDVCKNYAEAKDVFLGMFLYEYARRHPDYSVVLLLRLAKTYETTLEKCCAAADPHECYAKVFDEFKPLVEEPQNLIKQNCELFEQLGEYKFQNALLVRYTKKVPQVSTPTLVEVSRNLGKVGSKCCKHPEAKRMPCAEDYLSVVLNQLCVLHEKTPVSDRVTKCCTESLVNRRPCFSALGVDETYVPKEFNAETFTFHADICTLSEKERQIKKQTALVELVKHKPKATKEQLKAVMDKFAAFVEKCCKADDKETCFAEEGPKLVAASQAALGL

SEQ ID NO: 2528 - protein, 585 aa, synthetic construct
DAHKSEVAHRFKDLGEENFKALVLIAFAQYLQQAPFEDHVKLVNEVTEFAKTCVADESAENCDKSLHTLFGDKLCTVATLRETYGEMADCCAKQEPERNECFLQHKDDNPNLPRLVRPEVDVMCTAFHDNEETFLKKYLYEIARRHPYFYAPELLFFAKRYKAAFTECCQAADKAACLLPKLDELRDEGKASSAKQRLKCASLQKFGERAFKAWAVARLSQRFPKAEFAEVSKLVTDLTKVHTECCHGDLLECADDRADLAKYICENQDSISSKLKECCEKPLLEKSHCIAEVENDEMPADLPSLAADFVESKDVCKNYAEAKDVFLGMFLYEYARRHPDYSVVLLLRLAKTYETTLEKCCAAADPHECYAKVFDEFKPLVEEPQNLIKQNCELFEQLGEYKFQNALLVRYTKKVPQVSTPTLVEVSRNLGKVGSKCCKHPEAKRMPCAEDYLSVVLNQLCVLHEKTPVSDRVTKCCTESLVNRRPCFSALDVDETYVPKEFNAETFTFHADICTLSEKERQIKKQTALVELVKHKPKATKEQLKAVMDKFAAFVEKCCKADDKETCFAEEGPKLVAASQAALGL

SEQ ID NO: 2529 - protein, 585 aa, synthetic construct
DAHKSEVAHRFKDLGEENFKALVLIAFAQYLQQAPFEDHVKLVNEVTEFAKTCVADESAENCDKSLHTLFGDKLCTVATLRETYGEMADCCAKQEPERNECFLQHKDDNPNLPRLVRPEVDVMCTAFHDNEETFLKKYLYEIARRHPYFYAPELLFFAKRYKAAFTECCQAADKAACLLPKLDELRDEGKASSAKQRLKCASLQKFGERAFKAWAVARLSQRFPKAEFAEVSKLVTDLTKVHTECCHGDLLECADDRADLAKYICENQDSISSKLKECCEKPLLEKSHCIAEVENDEMPADLPSLAADFVESKDVCKNYAEAKDVFLGMFLYEYARRHPDYSVVLLLRLAKTYETTLEKCCAAADPHECYAKVFDEFKPLVEEPQNLIKQNCELFEQLGEYKFQNALLVRYTKKVPQVSTPTLVEVSRNLGKVGSKCCKHPEAKRMPCAEDYLSVVLNQLCVLHEKTPVSDRVTKCCTESLVNRRPCFSALEVDETYVPKEFNAETFTFHADICTLSEKERQIKKQTALVELVKHKPKATKEQLKAVMDKFAAFVEKCCKADDKETCFAEEGPHLVAASQAALGL

SEQ ID NO: 2530 - protein, 585 aa, synthetic construct
DAHKSEVAHRFKDLGEENFKALVLIAFAQYLQQAPFEDHVKLVNEVTEFAKTCVADESAENCDKSLHTLFGDKLCTVATLRETYGEMADCCAKQEPERNECFLQHKDDNPNLPRLVRPEVDVMCTAFHDNEETFLKKYLYEIARRHPYFYAPELLFFAKRYKAAFTECCQAADKAACLLPKLDELRDEGKASSAKQRLKCASLQKFGERAFKAWAVARLSQRFPKAEFAEVSKLVTDLTKVHTECCHGDLLECADDRADLAKYICENQDSISSKLKECCEKPLLEKSHCIAEVENDEMPADLPSLAADFVESKDVCKNYAEAKDVFLGMFLYEYARRHPDYSVVLLLRLAKTYETTLEKCCAAADPHECYAKVFDEFKPLVEEPQNLIKQNCELFEQLGEYKFQNALLVRYTKKVPQVSTPTLVEVSRNLGKVGSKCCKHPEAKRMPCAEDYLSVVLNQLCVLHEKTPVSDRVTKCCTESLVNRRPCFSALEVDETYVPKEFNAETFTFHADICTLSEKERQIKKQTALVELVKHKPKATKEQLKAVMDDFAAFVEKCCKADDKETCFAEEGPHLVAASKAALGL

SEQ ID NO: 2531 - protein, 585 aa, synthetic construct
DAHKSEVAHRFKDLGEENFKALVLIAFAQYLQQAPFEDHVKLVNEVTEFAKTCVADESAENCDKSLHTLFGDKLCTVATLRETYGEMADCCAKQEPERNECFLQHKDDNPNLPRLVRPEVDVMCTAFHDNEETFLKKYLYEIARRHPYFYAPELLFFAKRYKAAFTECCQAADKAACLLPKLDELRDEGKASSAKQRLKCASLQKFGERAFKAWAVARLSQRFPKAEFAEVSKLVTDLTKVHTECCHGDLLECADDRADLAKYICENQDSISSKLKECCEKPLLEKSHCIAEVENDEMPADLPSLAADFVESKDVCKNYAEAKDVFLGMFLYEYARRHPDYSVVLLLRLAKTYETTLEKCCAAADPHECYAKVFDEFKPLVEEPQNLIKQNCELFEQLGEYKFQNALLVRYTKKVPQVSTPTLVEVSRNLGKVGSKCCKHPEAKRMPCAEDYLSVVLNQLCVLHEKTPVSDRVTKCCTESLVNRRPCFSALEVDETYVPKEFNAETFTFHADICTLSEKERQIKKQTALVELVKHKPKATKEQLKAVMDKFAAFVEKCCKADDKETCFAEEGPKLVAASKAALGL

SEQ ID NO: 2532 - protein, 585 aa, synthetic construct
DAHKSEVAHRFKDLGEENFKALVLIAFAQYLQQAPFEDHVKLVNEVTEFAKTCVADESAENCDKSLHTLFGDKLCTVATLRETYGEMADCCAKQEPERNECFLQHKDDNPNLPRLVRPEVDVMCTAFHDNEETFLKKYLYEIARRHPYFYAPELLFFAKRYKAAFTECCQAADKAACLLPKLDELRDEGKASSAKQRLKCASLQKFGERAFKAWAVARLSQRFPKAEFAEVSKLVTDLTKVHTECCHGDLLECADDRADLAKYICENQDSISSKLKECCEKPLLEKSHCIAEVENDEMPADLPSLAADFVESKDVCKNYAEAKDVFLGMFLYEYARRHPDYSVVLLLRLAKTYETTLEKCCAAADPHECYAKVFDEFKPLVEEPQNLIKQNCELFEQLGEYKFQNALLVRYTKKVPQVSTPTLVEVSRNLGKVGSKCCKHPEAKRMPCAEDYLSVVLNQLCVLHEKTPVSDRVTKCCTESLVNRRPCFSALDVDETYVPKEFNAETFTFHADICTLSEKERQIKKQTALVELVKHKPKATKEQLKAVMDDFAAFVEKCCKADDKETCFAEEGPKLVAASKAALGL

SEQ ID NO: 2533 - protein, 330 aa, synthetic construct
ASTKGPSVFPLAPSSKSTSGGTAALGCLVKDYFPEPVTVSWNSGALTSGVHTFPAVLQSSGLYSLSSVVTVPSSSLGTQTYICNVNHKPSNTKVDKKVEPKSCDKTHTCPPCPAPELLGGPSVFLFPPKPKDTLMISRTPEVTCVVVDVSHEDPEVKFNWYVDGVEVHNAKTKPCEEQYGSTYRCVSVLTVLHQDWLNGKEYKCKVSNKALPAPIEKTISKAKGQPREPQVYTLPPSREEMTKNQVSLTCLVKGFYPSDIAVEWESNGQPENNYDTTPPVLDSDGSFFLYSDLTVDKSRWQQGNVFSCSVMHEALHNHYTQKSLSLSPGK

SEQ ID NO: 2534 - protein, 333 aa, synthetic construct
GQPKAAPSVTLFPPSSEELQANKATLVCLISDFYPGAVTVAWKADSSPVKAGVETTTPSKQSNNKYAASSYLSLTPEQWKSHRSYSCQVTHEGSTVEKTVAPTECSDKTHTCPPCPAPELLGGPSVFLFPPKPKDTLMISRTPEVTCVVVDVSHEDPEVKFNWYVDGVEVHNAKTKPCEEQYGSTYRCVSVLTVLHQDWLNGKEYKCKVSNKALPAPIEKTISKAKGQPREPQVYTLPPSRKEMTKNQVSLTCLVKGFYPSDIAVEWESNGQPENNYKTTPPVLKSDGSFFLYSKLTVDKSRWQQGNVFSCSVMHEALHNHYTQKSLSLSPGK

SEQ ID NO: 2535 - protein, 330 aa, synthetic construct
ASTKGPSVFPLAPCSRSTSESTAALGCLVKDYFPEPVTVSWNSGALTSGVHTFPAVLQSSGLYSLSSVVTVPSSNFGTQTYTCNVDHKPSNTKVDKTVEPKSSDKTHTCPPCPAPEAAGGPSVFLFPPKPKDTLMISRTPEVTCVVVDVSHEDPEVKFNWYVDGVEVHNAKTKPREEQYNSTYRVVSVLTVLHQDWLNGKEYKCKVSNKALPAPIEKTISKAKGQPREPQVYTLPPSREEMTKNQVSLTCLVKGFYPSDIAVEWESNGQPENNYDTTPPVLDSDGSFFLYSDLTVDKSRWQQGNVFSCSVMHEALHNHYTQKSLSLSPGK

SEQ ID NO: 2536 - protein, 338 aa, synthetic construct
GQPKAAPSVTLFPPSSEELQANKATLVCLISDFYPGAVTVAWKADSSPVKAGVETTTPSKQSNNKYAASSYLSLTPEQWKSHRSYSCQVTHEGSTVEKTVAPTECSEPKSSDKTHTCPPCPAPEAAGGPSVFLFPPKPKDTLMISRTPEVTCVVVDVSHEDPEVKFNWYVDGVEVHNAKTKPREEQYNSTYRVVSVLTVLHQDWLNGKEYKCKVSNKALPAPIEKTISKAKGQPREPQVYTLPPSRKEMTKNQVSLTCLVKGFYPSDIAVEWESNGQPENNYKTTPPVLKSDGSFFLYSKLTVDKSRWQQGNVFSCSVMHEALHNHYTQKSLSLSPGK

SEQ ID NO: 2537 - protein, 227 aa, synthetic construct
DKTHTCPPCPAPELLGGPSVFLFPPKPKDTLMISRTPEVTCVVVDVSHEDPEVKFNWYVDGVEVHNAKTKPCEEQYGSTYRCVSVLTVLHQDWLNGKEYKCKVSNKALPAPIEKTISKAKGQPREPQVYTLPPSRKEMTKNQVSLTCLVKGFYPSDIAVEWESNGQPENNYKTTPPVLKSDGSFFLYSKLTVDKSRWQQGNVFSCSVMHEALHNHYTQKSLSLSPGK

SEQ ID NO: 2538 - protein, 227 aa, synthetic construct
DKTHTCPPCPAPELLGGPSVFLFPPKPKDTLMISRTPEVTCVVVDVSHEDPEVKFNWYVDGVEVHNAKTKPCEEQYGSTYRCVSVLTVLHQDWLNGKEYKCKVSNKALPAPIEKTISKAKGQPREPQVYTLPPSREEMTKNQVSLTCLVKGFYPSDIAVEWESNGQPENNYDTTPPVLDSDGSFFLYSDLTVDKSRWQQGNVFSCSVMHEALHNHYTQKSLSLSPGK

SEQ ID NO: 2539 - protein, 232 aa, synthetic construct
EPKSSDKTHTCPPCPAPELLGGPSVFLFPPKPKDTLMISRTPEVTCVVVDVSHEDPEVKFNWYVDGVEVHNAKTKPCEEQYGSTYRCVSVLTVLHQDWLNGKEYKCKVSNKALPAPIEKTISKAKGQPREPQVYTLPPSRKEMTKNQVSLTCLVKGFYPSDIAVEWESNGQPENNYKTTPPVLKSDGSFFLYSKLTVDKSRWQQGNVFSCSVMHEALHNHYTQKSLSLSPGK

SEQ ID NO: 2540 - protein, 232 aa, synthetic construct
EPKSSDKTHTCPPCPAPELLGGPSVFLFPPKPKDTLMISRTPEVTCVVVDVSHEDPEVKFNWYVDGVEVHNAKTKPCEEQYGSTYRCVSVLTVLHQDWLNGKEYKCKVSNKALPAPIEKTISKAKGQPREPQVYTLPPSREEMTKNQVSLTCLVKGFYPSDIAVEWESNGQPENNYDTTPPVLDSDGSFFLYSDLTVDKSRWQQGNVFSCSVMHEALHNHYTQKSLSLSPGK

SEQ ID NO: 2541 - protein, 232 aa, synthetic construct
EPKSSDKTHTCPPCPAPEAAGGPSVFLFPPKPKDTLMISRTPEVTCVVVDVSHEDPEVKFNWYVDGVEVHNAKTKPREEQYNSTYRVVSVLTVLHQDWLNGKEYKCKVSNKALPAPIEKTISKAKGQPREPQVYTLPPSRKEMTKNQVSLTCLVKGFYPSDIAVEWESNGQPENNYKTTPPVLKSDGSFFLYSKLTVDKSRWQQGNVFSCSVMHEALHNHYTQKSLSLSPGK

SEQ ID NO: 2542 - protein, 232 aa, synthetic construct
EPKSSDKTHTCPPCPAPEAAGGPSVFLFPPKPKDTLMISRTPEVTCVVVDVSHEDPEVKFNWYVDGVEVHNAKTKPREEQYNSTYRVVSVLTVLHQDWLNGKEYKCKVSNKALPAPIEKTISKAKGQPREPQVYTLPPSREEMTKNQVSLTCLVKGFYPSDIAVEWESNGQPENNYDTTPPVLDSDGSFFLYSDLTVDKSRWQQGNVFSCSVMHEALHNHYTQKSLSLSPGK

SEQ ID NO: 2543 - protein, 217 aa, synthetic construct
APELLGGPSVFLFPPKPKDTLMISRTPEVTCVVVDVSHEDPEVKFNWYVDGVEVHNAKTKPREEQYNSTYRVVSVLTVLHQDWLNGKEYKCKVSNKALPAPIEKTISKAKGQPREPQVTTLPPSREEMTKNQVSLTCLVKGFYPSDIAVEWESNGQPENNYDTTPPVLDSDGSFFLYSDLTVDKSRWQQGNVFSCSVMHEALHNHYTQKSLSLSPGK

SEQ ID NO: 2544 - protein, 227 aa, synthetic construct
DKTHTCPPCPAPELLGGPSVFLFPPKPKDTLMISRTPEVTCVVVDVSHEDPEVKFNWYVDGVEVHNAKTKPCEEQYGSTYRCVSVLTVLHQDWLNGKEYKCKVSNKALPAPIEKTISKAKGQPREPQVYTLPPSREEMTKNQVSLTCLVKGFYPSDIAVEWESNGQPENNYKTTPPVLDSDGSFFLYSKLTVDKSRWQQGNVFSCSVMHEALHNHYTQKSLSLSPGK

SEQ ID NO: 2545 - protein, 225 aa, synthetic construct
DKTHTCPPCPAPELLGGPSVFLFPPKPKDTLMISRTPEVTCVVVDVSHEDPEVKFNWYVDGVEVHNAKTKPCEEQYGSTYRCVSVLTVLHQDWLNGKEYKCKVSNKALPAPIEKTISKAKGQPREPQVYTLPPSREEMTKNQVSLTCLVKGFYPSDIAVEWESNGQPENNYKTTPPVLDSDGSFFLYSKLTVDKSRWQQGNVFSCSVMHEALHNHYTQKSLSLSP

SEQ ID NO: 2546 - protein, 227 aa, synthetic construct
DKTHTCPPCPAPELLGGPSVFLFPPKPKDTLMISRTPEVTCVVVDVSHEDPEVKFNWYVDGVEVHNAKTKPREEQYNSTYRVVSVLTVLHQDWLNGKEYKCKVSNKALPAPIEKTISKAKGQPREPQVYTLPPSREEMTKNQVSLTCLVKGFYPSDIAVEWESNGQPENNYKTTPPVLDSDGSFFLYSKLTVDKSRWQQGNVFSCSVMHEALHNHYTQKSLSLSPGK

SEQ ID NO: 2547 - protein, 225 aa, synthetic construct
DKTHTCPPCPAPELLGGPSVFLFPPKPKDTLMISRTPEVTCVVVDVSHEDPEVKFNWYVDGVEVHNAKTKPREEQYNSTYRVVSVLTVLHQDWLNGKEYKCKVSNKALPAPIEKTISKAKGQPREPQVYTLPPSREEMTKNQVSLTCLVKGFYPSDIAVEWESNGQPENNYKTTPPVLDSDGSFFLYSKLTVDKSRWQQGNVFSCSVMHEALHNHYTQKSLSLSP

SEQ ID NO: 2548 - protein, 227 aa, synthetic construct
DKTHTCPPCPAPELLGGPSVFLFPPKPKDTLMISRTPEVTCVVVDVSHEDPEVKFNWYVDGVEVHNAKTKPREEQYGSTYRVVSVLTVLHQDWLNGKEYKCKVSNKALPAPIEKTISKAKGQPREPQVYTLPPSREEMTKNQVSLTCLVKGFYPSDIAVEWESNGQPENNYKTTPPVLDSDGSFFLYSKLTVDKSRWQQGNVFSCSVMHEALHNHYTQKSLSLSPGK

SEQ ID NO: 2549 - protein, 225 aa, synthetic construct
DKTHTCPPCPAPELLGGPSVFLFPPKPKDTLMISRTPEVTCVVVDVSHEDPEVKFNWYVDGVEVHNAKTKPREEQYGSTYRVVSVLTVLHQDWLNGKEYKCKVSNKALPAPIEKTISKAKGQPREPQVYTLPPSREEMTKNQVSLTCLVKGFYPSDIAVEWESNGQPENNYKTTPPVLDSDGSFFLYSKLTVDKSRWQQGNVFSCSVMHEALHNHYTQKSLSLSP

SEQ ID NO: 2550 - protein, 227 aa, synthetic construct
DKTHTCPPCPAPELLGGPSVFLFPPKPKDTLMISRTPEVTCVVVDVSHEDPEVKFNWYVDGVEVHNAKTKPCEEQYNSTYRCVSVLTVLHQDWLNGKEYKCKVSNKALPAPIEKTISKAKGQPREPQVYTLPPSREEMTKNQVSLTCLVKGFYPSDIAVEWESNGQPENNYKTTPPVLDSDGSFFLYSKLTVDKSRWQQGNVFSCSVMHEALHNHYTQKSLSLSPGK

SEQ ID NO: 2551 - protein, 225 aa, synthetic construct
DKTHTCPPCPAPELLGGPSVFLFPPKPKDTLMISRTPEVTCVVVDVSHEDPEVKFNWYVDGVEVHNAKTKPCEEQYNSTYRCVSVLTVLHQDWLNGKEYKCKVSNKALPAPIEKTISKAKGQPREPQVYTLPPSREEMTKNQVSLTCLVKGFYPSDIAVEWESNGQPENNYKTTPPVLDSDGSFFLYSKLTVDKSRWQQGNVFSCSVMHEALHNHYTQKSLSLSP

SEQ ID NO: 2552 - protein, 484 aa, synthetic construct
DKTHTCPPCPAPELLGGPSVFLFPPKPKDTLMISRTPEVTCVVVDVSHEDPEVKFNWYVDGVEVHNAKTKPCEEQYGSTYRCVSVLTVLHQDWLNGKEYKCKVSNKALPAPIEKTISKAKGQPREPQVYTLPPSREEMTKNQVSLTCLVKGFYPSDIAVEWESNGQPENNYKTTPPVLDSDGSFFLYSKLTVDKSRWQQGNVFSCSVMHEALHNHYTQKSLSLSPGKGGGGSGGGGSGGGGSGGGGSGGGGSGGGGSDKTHTCPPCPAPELLGGPSVFLFPPKPKDTLMISRTPEVTCVVVDVSHEDPEVKFNWYVDGVEVHNAKTKPCEEQYGSTYRCVSVLTVLHQDWLNGKEYKCKVSNKALPAPIEKTISKAKGQPREPQVYTLPPSREEMTKNQVSLTCLVKGFYPSDIAVEWESNGQPENNYKTTPPVLDSDGSFFLYSKLTVDKSRWQQGNVFSCSVMHEALHNHYTQKSLSLSPGK

SEQ ID NO: 2553 - protein, 480 aa, synthetic construct
DKTHTCPPCPAPELLGGPSVFLFPPKPKDTLMISRTPEVTCVVVDVSHEDPEVKFNWYVDGVEVHNAKTKPCEEQYGSTYRCVSVLTVLHQDWLNGKEYKCKVSNKALPAPIEKTISKAKGQPREPQVYTLPPSREEMTKNQVSLTCLVKGFYPSDIAVEWESNGQPENNYKTTPPVLDSDGSFFLYSKLTVDKSRWQQGNVFSCSVMHEALHNHYTQKSLSLSPGGGGSGGGGSGGGGSGGGGSGGGGSGGGGSDKTHTCPPCPAPELLGGPSVFLFPPKPKDTLMISRTPEVTCVVVDVSHEDPEVKFNWYVDGVEVHNAKTKPCEEQYGSTYRCVSVLTVLHQDWLNGKEYKCKVSNKALPAPIEKTISKAKGQPREPQVYTLPPSREEMTKNQVSLTCLVKGFYPSDIAVEWESNGQPENNYKTTPPVLDSDGSFFLYSKLTVDKSRWQQGNVFSCSVMHEALHNHYTQKSLSLSP

SEQ ID NO: 2554 - protein, 484 aa, synthetic construct
DKTHTCPPCPAPELLGGPSVFLFPPKPKDTLMISRTPEVTCVVVDVSHEDPEVKFNWYVDGVEVHNAKTKPREEQYNSTYRVVSVLTVLHQDWLNGKEYKCKVSNKALPAPIEKTISKAKGQPREPQVYTLPPSREEMTKNQVSLTCLVKGFYPSDIAVEWESNGQPENNYKTTPPVLDSDGSFFLYSKLTVDKSRWQQGNVFSCSVMHEALHNHYTQKSLSLSPGKGGGGSGGGGSGGGGSGGGGSGGGGSGGGGSDKTHTCPPCPAPELLGGPSVFLFPPKPKDTLMISRTPEVTCVVVDVSHEDPEVKFNWYVDGVEVHNAKTKPREEQYNSTYRVVSVLTVLHQDWLNGKEYKCKVSNKALPAPIEKTISKAKGQPREPQVYTLPPSREEMTKNQVSLTCLVKGFYPSDIAVEWESNGQPENNYKTTPPVLDSDGSFFLYSKLTVDKSRWQQGNVFSCSVMHEALHNHYTQKSLSLSPGK

SEQ ID NO: 2555 - protein, 480 aa, synthetic construct
DKTHTCPPCPAPELLGGPSVFLFPPKPKDTLMISRTPEVTCVVVDVSHEDPEVKFNWYVDGVEVHNAKTKPREEQYNSTYRVVSVLTVLHQDWLNGKEYKCKVSNKALPAPIEKTISKAKGQPREPQVYTLPPSREEMTKNQVSLTCLVKGFYPSDIAVEWESNGQPENNYKTTPPVLDSDGSFFLYSKLTVDKSRWQQGNVFSCSVMHEALHNHYTQKSLSLSPGGGGSGGGGSGGGGSGGGGSGGGGSGGGGSDKTHTCPPCPAPELLGGPSVFLFPPKPKDTLMISRTPEVTCVVVDVSHEDPEVKFNWYVDGVEVHNAKTKPREEQYNSTYRVVSVLTVLHQDWLNGKEYKCKVSNKALPAPIEKTISKAKGQPREPQVYTLPPSREEMTKNQVSLTCLVKGFYPSDIAVEWESNGQPENNYKTTPPVLDSDGSFFLYSKLTVDKSRWQQGNVFSCSVMHEALHNHYTQKSLSLSP

SEQ ID NO: 2556 - protein, 484 aa, synthetic construct
DKTHTCPPCPAPELLGGPSVFLFPPKPKDTLMISRTPEVTCVVVDVSHEDPEVKFNWYVDGVEVHNAKTKPREEQYGSTYRVVSVLTVLHQDWLNGKEYKCKVSNKALPAPIEKTISKAKGQPREPQVYTLPPSREEMTKNQVSLTCLVKGFYPSDIAVEWESNGQPENNYKTTPPVLDSDGSFFLYSKLTVDKSRWQQGNVFSCSVMHEALHNHYTQKSLSLSPGKGGGGSGGGGSGGGGSGGGGSGGGGSGGGGSDKTHTCPPCPAPELLGGPSVFLFPPKPKDTLMISRTPEVTCVVVDVSHEDPEVKFNWYVDGVEVHNAKTKPREEQYGSTYRVVSVLTVLHQDWLNGKEYKCKVSNKALPAPIEKTISKAKGQPREPQVYTLPPSREEMTKNQVSLTCLVKGFYPSDIAVEWESNGQPENNYKTTPPVLDSDGSFFLYSKLTVDKSRWQQGNVFSCSVMHEALHNHYTQKSLSLSPGK

SEQ ID NO: 2557 - protein, 480 aa, synthetic construct
DKTHTCPPCPAPELLGGPSVFLFPPKPKDTLMISRTPEVTCVVVDVSHEDPEVKFNWYVDGVEVHNAKTKPREEQYGSTYRVVSVLTVLHQDWLNGKEYKCKVSNKALPAPIEKTISKAKGQPREPQVYTLPPSREEMTKNQVSLTCLVKGFYPSDIAVEWESNGQPENNYKTTPPVLDSDGSFFLYSKLTVDKSRWQQGNVFSCSVMHEALHNHYTQKSLSLSPGGGGSGGGGSGGGGSGGGGSGGGGSGGGGSDKTHTCPPCPAPELLGGPSVFLFPPKPKDTLMISRTPEVTCVVVDVSHEDPEVKFNWYVDGVEVHNAKTKPREEQYGSTYRVVSVLTVLHQDWLNGKEYKCKVSNKALPAPIEKTISKAKGQPREPQVYTLPPSREEMTKNQVSLTCLVKGFYPSDIAVEWESNGQPENNYKTTPPVLDSDGSFFLYSKLTVDKSRWQQGNVFSCSVMHEALHNHYTQKSLSLSP

SEQ ID NO: 2558 - protein, 484 aa, synthetic construct
DKTHTCPPCPAPELLGGPSVFLFPPKPKDTLMISRTPEVTCVVVDVSHEDPEVKFNWYVDGVEVHNAKTKPCEEQYNSTYRCVSVLTVLHQDWLNGKEYKCKVSNKALPAPIEKTISKAKGQPREPQVYTLPPSREEMTKNQVSLTCLVKGFYPSDIAVEWESNGQPENNYKTTPPVLDSDGSFFLYSKLTVDKSRWQQGNVFSCSVMHEALHNHYTQKSLSLSPGKGGGGSGGGGSGGGGSGGGGSGGGGSGGGGSDKTHTCPPCPAPELLGGPSVFLFPPKPKDTLMISRTPEVTCVVVDVSHEDPEVKFNWYVDGVEVHNAKTKPCEEQYNSTYRCVSVLTVLHQDWLNGKEYKCKVSNKALPAPIEKTISKAKGQPREPQVYTLPPSREEMTKNQVSLTCLVKGFYPSDIAVEWESNGQPENNYKTTPPVLDSDGSFFLYSKLTVDKSRWQQGNVFSCSVMHEALHNHYTQKSLSLSPGK

SEQ ID NO: 2559 - protein, 480 aa, synthetic construct
DKTHTCPPCPAPELLGGPSVFLFPPKPKDTLMISRTPEVTCVVVDVSHEDPEVKFNWYVDGVEVHNAKTKPCEEQYNSTYRCVSVLTVLHQDWLNGKEYKCKVSNKALPAPIEKTISKAKGQPREPQVYTLPPSREEMTKNQVSLTCLVKGFYPSDIAVEWESNGQPENNYKTTPPVLDSDGSFFLYSKLTVDKSRWQQGNVFSCSVMHEALHNHYTQKSLSLSPGGGGSGGGGSGGGGSGGGGSGGGGSGGGGSDKTHTCPPCPAPELLGGPSVFLFPPKPKDTLMISRTPEVTCVVVDVSHEDPEVKFNWYVDGVEVHNAKTKPCEEQYNSTYRCVSVLTVLHQDWLNGKEYKCKVSNKALPAPIEKTISKAKGQPREPQVYTLPPSREEMTKNQVSLTCLVKGFYPSDIAVEWESNGQPENNYKTTPPVLDSDGSFFLYSKLTVDKSRWQQGNVFSCSVMHEALHNHYTQKSLSLSP

SEQ ID NO: 2560-2999 - skipped (440 entries)

SEQ ID NO: 3000 - protein, 107 aa, synthetic construct
DIQMTQSPSFLSASVGDRVTITCSASQGISNYLNWYQQKPGKAVKLLIYYTSSLHSGVPSRFSGSGSGTEYTLTISSLQPEDFATYYCQQYSKLPRTFGGGTKVEIK

SEQ ID NO: 3001 - protein, 107 aa, synthetic construct
DIQMTQSPSSLSASVGDRVTITCSASQGISNYLNWYQQKPGKAVKLLIYYTSSLHSGVPSRFSGSGSGTDYTLTISSLQPEDFATYYCQQYSKLPRTFGGGTKVEIK

SEQ ID NO: 3002 - protein, 107 aa, synthetic construct
DIQMTQSPSSLSASVGDRVTITCSASQGISNYLNWYQQKPGKVVKLLIYYTSSLHSGVPSRFSGSGSGTDYTLTISSLQPEDVATYYCQQYSKLPRTFGGGTKVEIK

SEQ ID NO: 3003 - protein, 107 aa, synthetic construct
DIQMTQSPSSLSASVGDRVTITCSASQGISNYLNWYQQKPGQAVKLLIYYTSSLHSGVPSRFSGSGSGTDYTLTISSLQPEDVATYYCQQYSKLPRTFGGGTKVEIK

SEQ ID NO: 3004 - protein, 107 aa, synthetic construct
DIQMTQSPSSLSASVGDRVTITCSASQGISNYLNWYQQKPGKAVKLLIYYTSSLHSGVPSRFSGSGSGTDYTFTISSLQPEDIATYYCQQYSKLPRTFGGGTKVEIK

SEQ ID NO: 3005 - protein, 107 aa, synthetic construct
DIQMTQSPSSLSASVGDRVTITCSASQGISNYLNWYQQKPGKTVKLLIYYTSSLHSGIPSRFSGSGSGTDYTLTIRSLQPEDFATYYCQQYSKLPRTFGGGTKVEIK

SEQ ID NO: 3006 - protein, 107 aa, synthetic construct
AIQMTQSPSSLSASVGDRVTITCSASQGISNYLNWYQQKPGKAVKLLIYYTSSLHSGVPSRFSGSGSGTDYTLTISSLQPEDFATYYCQQYSKLPRTFGGGTKVEIK

SEQ ID NO: 3007 - protein, 107 aa, synthetic construct
DIQMTQSPSSVSASVGDRVTITCSASQGISNYLNWYQQKPGKAVKLLIYYTSSLHSGVPSRFSGSGSGTDYTLTISSLQPEDFATYYCQQYSKLPRTFGGGTKVEIK

SEQ ID NO: 3008 - protein, 107 aa, synthetic construct
DIQMTQSPSSLSASVGDRVTITCSASQGISNYLNWYQQKPGKAVKRLIYYTSSLHSGVPSRFSGSGSGTEYTLTISNLQPEDFATYYCQQYSKLPRTFGGGTKVEIK

SEQ ID NO: 3009 - protein, 107 aa, synthetic construct
AIRMTQSPFSLSASVGDRVTITCSASQGISNYLNWYQQKPAKAVKLFIYYTSSLHSGVPSRFSGSGSGTDYTLTISSLQPEDFATYYCQQYSKLPRTFGGGTKVEIK

SEQ ID NO: 3010 - protein, 107 aa, synthetic construct
DIQMTQSPSSLSASVGDRVTITCSASQGISNYLNWYQQKPGKAVKRLIYYTSSLHSGVPSRFSGSGSGTEYTLTISSLQPEDFATYYCQQYSKLPRTFGGGTKVEIK

SEQ ID NO: 3011 - protein, 107 aa, synthetic construct
DIQMTQSPSTLSASVGDRVTITCSASQGISNYLNWYQQKPGKAVKLLIYYTSSLHSGVPSRFSGSGSGTEYTLTISSLQPDDFATYYCQQYSKLPRTFGGGTKVEIK

SEQ ID NO: 3012 - protein, 107 aa, synthetic construct
DIQMTQSPSSLSASVGDRVTITCSASQGISNYLNWYQQKPGKAVKSLIYYTSSLHSGVPSRFSGSGSGTDYTLTISSLQPEDFATYYCQQYSKLPRTFGGGTKVEIK

SEQ ID NO: 3013 - protein, 107 aa, synthetic construct
DIQMTQSPSSLSASVGDRVTITCSASQGISNYLNWYQQKPGKAVKSLIYYTSSLHSGVPSKFSGSGSGTDYTLTISSLQPEDFATYYCQQYSKLPRTFGGGTKVEIK

SEQ ID NO: 3014 - protein, 107 aa, synthetic construct
DIQMTQSPSSLSASVGDRVTITCSASQGISNYLNWYQQKPEKAVKSLIYYTSSLHSGVPSRFSGSGSGTDYTLTISSLQPEDFATYYCQQYSKLPRTFGGGTKVEIK

SEQ ID NO: 3015 - protein, 107 aa, synthetic construct
DIQMTQSPSAMSASVGDRVTITCSASQGISNYLNWYQQKPGKVVKRLIYYTSSLHSGVPSRFSGSGSGTEYTLTISSLQPEDFATYYCQQYSKLPRTFGGGTKVEIK

SEQ ID NO: 3016 - protein, 107 aa, synthetic construct
DIVMTQSPDSLAVSLGERATINCSASQGISNYLNWYQQKPGQPVKLLIYYTSSLHSGVPDRFSGSGSGTDYTLTISSLQAEDVAVYYCQQYSKLPRTFGGGTKVEIK

SEQ ID NO: 3017 - protein, 107 aa, synthetic construct
EIVMTQSPGTLSLSPGERATLSCSASQGISNYLNWYQQKPGQAVKLLIYYTSSLHSGIPDRFSGSGSGTDYTLTISRLEPEDFAVYYCQQYSKLPRTFGGGTKVEIK

SEQ ID NO: 3018 - protein, 107 aa, synthetic construct
EIVMTQSPPTLSLSPGERVTLSCSASQGISNYLNWYQQKPGQAVKLLIYYTSSLHSGIPARFSGSGSGTDYTLTISSLQPEDFAVYYCQQYSKLPRTFGGGTKVEIK

SEQ ID NO: 3019 - protein, 107 aa, synthetic construct
EIVMTQSPPTLSLSPGERVTLSCSASQGISNYLNWYQQKPGQAVKLLIYYTSSLHSSIPARFSGSGSGTDYTLTISSLQPEDFAVYYCQQYSKLPRTFGGGTKVEIK

SEQ ID NO: 3020 - protein, 107 aa, synthetic construct
EIVMTQSPATLSLSPGERATLSCSASQGISNYLNWYQQKPGQAVKLLIYYTSSLHSGIPARFSGSGSGTDYTLTISSLEPEDFAVYYCQQYSKLPRTFGGGTKVEIK

SEQ ID NO: 3021 - protein, 107 aa, synthetic construct
EIVMTQSPATLSLSPGERATLSCSASQGISNYLNWYQQKPGQAVKLLIYYTSSLHSGIPARFSGSGSGTDYTLTISRLEPEDFAVYYCQQYSKLPRTFGGGTKVEIK

SEQ ID NO: 3022 - protein, 107 aa, synthetic construct
EIVMTQSPATLSLSPGERATLSCSASQGISNYLNWYQQKPGQAVKLLIYYTSSLHSGIPDRFSGSGSGTDYTLTISRLEPEDFAVYYCQQYSKLPRTFGGGTKVEIK

SEQ ID NO: 3023 - protein, 107 aa, synthetic construct
EIVMTQSPATLSLSPGERATLSCSASQGISNYLNWYQQKPGLAVKLLIYYTSSLHSGIPDRFSGSGSGTDYTLTISRLEPEDFAVYYCQQYSKLPRTFGGGTKVEIK

SEQ ID NO: 3024 - protein, 107 aa, synthetic construct
DIQMIQSPSFLSASVGDRVSIICSASQGISNYLNWYLQKPGKSVKLFIYYTSSLHSGVSSRFSGRGSGTDYTLTIISLKPEDFAAYYCQQYSKLPRTFGGGTKVEIK

SEQ ID NO: 3025 - protein, 107 aa, synthetic construct
EIVMTQSPATLSLSPGERATLSCSASQGISNYLNWYQQKPGQAVKLLIYYTSSLHSGIPARFSGSGSGTDYTLTISSLQPEDFAVYYCQQYSKLPRTFGGGTKVEIK

SEQ ID NO: 3026 - protein, 107 aa, synthetic construct
EIVMTQSPATLSLSPGERATLSCSASQGISNYLNWYQQKPGQAVKLLIYYTSSLHSGIPARFSGSGPGTDYTLTISSLEPEDFAVYYCQQYSKLPRTFGGGTKVEIK

SEQ ID NO: 3027 - protein, 107 aa, synthetic construct
DIVMTQTPLSLSVTPGQPASISCSASQGISNYLNWYLQKPGQSVKLLIYYTSSLHSGVPDRFSGSGSGTDYTLKISRVEAEDVGVYYCQQYSKLPRTFGGGTKVEIK

SEQ ID NO: 3028 - protein, 107 aa, synthetic construct
DIVMTQTPLSLSVTPGQPASISCSASQGISNYLNWYLQKPGQPVKLLIYYTSSLHSGVPDRFSGSGSGTDYTLKISRVEAEDVGVYYCQQYSKLPRTFGGGTKVEIK

SEQ ID NO: 3029 - protein, 107 aa, synthetic construct
DIVMTQSPAFLSVTPGEKVTITCSASQGISNYLNWYQQKPDQAVKLLIYYTSSLHSGVPSRFSGSGSGTDYTFTISSLEAEDAATYYCQQYSKLPRTFGGGTKVEIK

SEQ ID NO: 3030 - protein, 107 aa, synthetic construct
DIVMTQSPLSLPVTPGEPASISCSASQGISNYLNWYLQKPGQSVKLLIYYTSSLHSGVPDRFSGSGSGTDYTLKISRVEAEDVGVYYCQQYSKLPRTFGGGTKVEIK

SEQ ID NO: 3031 - protein, 107 aa, synthetic construct
DIVMTQTPLSLPVTPGEPASISCSASQGISNYLNWYLQKPGQSVKLLIYYTSSLHSGVPDRFSGSGSGTDYTLKISRVEAEDVGVYYCQQYSKLPRTFGGGTKVEIK

SEQ ID NO: 3032 - protein, 107 aa, synthetic construct
EIVMTQSPATLSVSPGERATLSCSASQGISNYLNWYQQKPGQAVKLLIYYTSSLHSGIPARFSGSGSGTEYTLTISILQSEDFAVYYCQQYSKLPRTFGGGTKVEIK

SEQ ID NO: 3033 - protein, 107 aa, synthetic construct
EIVMTQSPATLSVSPGERATLSCSASQGISNYLNWYQQKPGQAVKLLIYYTSSLHSGIPARFSGSGSGTEYTLTISSLQSEDFAVYYCQQYSKLPRTFGGGTKVEIK

SEQ ID NO: 3034 - protein, 107 aa, synthetic construct
DIVMTQSPLSLPVTLGQPASISCSASQGISNYLNWYQQRPGQSVKRLIYYTSSLHSGVPDRFSGSGSGTDYTLKISRVEAEDVGVYYCQQYSKLPRTFGGGTKVEIK

SEQ ID NO: 3035 - protein, 107 aa, synthetic construct
EITMTQSPAFMSATPGDKVNISCSASQGISNYLNWYQQKPGEAVKFIIYYTSSLHSGIPPRFSGSGYGTDYTLTINNIESEDAAYYYCQQYSKLPRTFGGGTKVEIK

SEQ ID NO: 3036 - protein, 107 aa, synthetic construct
DIVMTQTPLSSPVTLGQPASISCSASQGISNYLNWYQQRPGQPVKLLIYYTSSLHSGVPDRFSGSGAGTDYTLKISRVEAEDVGVYYCQQYSKLPRTFGGGTKVEIK

SEQ ID NO: 3037 - protein, 107 aa, synthetic construct
EIVMTQSPDFQSVTPKEKVTITCSASQGISNYLNWYQQKPDQSVKLLIYYTSSLHSGVPSRFSGSGSGTDYTLTINSLEAEDAATYYCQQYSKLPRTFGGGTKVEIK

SEQ ID NO: 3038 - protein, 107 aa, synthetic construct
EIVMTQTPLSLSITPGEQASISCSASQGISNYLNWYLQKARPVVKLLIYYTSSLHSGVPDRFSGSGSGTDYTLKISRVEAEDFGVYYCQQYSKLPRTFGGGTKVEIK

SEQ ID NO: 3039 - protein, 107 aa, synthetic construct
EIVMTQTPLSLSITPGEQASMSCSASQGISNYLNWYLQKARPVVKLLIYYTSSLHSGVPDRFSGSGSGTDYTLKISRVEAEDFGVYYCQQYSKLPRTFGGGTKVEIK

SEQ ID NO: 3040 - protein, 120 aa, synthetic construct
QVTLKESGPVLVKPTETLTLTCTVSGFSLTAYGVNWVRQPPGKALEWLGMIWGDGNTDYNSALKSRLTISKDNSKSQVVLTMTNMDPVDTATYYCARDRVTATLYAMDYWGQGTLVTVSS

SEQ ID NO: 3041 - protein, 120 aa, synthetic construct
QVTLKESGPALVKPTETLTLTCTVSGFSLTAYGVNWVRQPPGKALEWLGMIWGDGNTDYNSALKSRLIISKDNSKSQVVLTMTNMDPVDTATYYCARDRVTATLYAMDYWGQGTLVTVSS

SEQ ID NO: 3042 - protein, 120 aa, synthetic construct
QVTLKESGPALVKPTQTLTLTCTVSGFSLTAYGVNWVRQPPGKALEWLGMIWGDGNTDYNSALKSRLTISKDNSKSQVVLTMTNMDPVDTATYYCARDRVTATLYAMDYWGQGTLVTVSS

SEQ ID NO: 3043 - protein, 120 aa, synthetic construct
QVQLQESGPGLVKPSGTLSLTCAVSGFSLTAYGVNWVRQPPGKGLEWLGMIWGDGNTDYNSALKSRLTISKDNSKSQVSLKLSSVTAADTAVYYCARDRVTATLYAMDYWGQGTLVTVSS

SEQ ID NO: 3044 - protein, 120 aa, synthetic construct
QVTLKESGPTLVKPTQTLTLTCTVSGFSLTAYGVNWVRQPPGKALEWLGMIWGDGNTDYNSALKSRLTITKDNSKSQVVLTMTNMDPVDTATYYCARDRVTATLYAMDYWGQGTLVTVSS

SEQ ID NO: 3045 - protein, 120 aa, synthetic construct
QVTLKESGPALVKPTQTLTLTCTVSGFSLTAYGVNWVRQPPGKALEWLGMIWGDGNTDYNSALKSRLTITKDNSKSQVVLTMTNMDPVDTATYYCARDRVTATLYAMDYWGQGTLVTVSS

SEQ ID NO: 3046 - protein, 120 aa, synthetic construct
QVQLQESGPGLVKPSQTLSLTCTVSGFSLTAYGVNWVRQPPGKGLEWLGMIWGDGNTDYNSALKSRLTISKDNSKSQVSLKLSSVTAADTAVYYCARDRVTATLYAMDYWGQGTLVTVSS

SEQ ID NO: 3047 - protein, 120 aa, synthetic construct
QVQLQESGPGLVKPSETLSLTCTVSGFSLTAYGVNWVRQPPGKGLEWLGMIWGDGNTDYNSALKSRLTISKDNSKSQVSLKLSSVTAADTAVYYCARDRVTATLYAMDYWGQGTLVTVSS

SEQ ID NO: 3048 - protein, 120 aa, synthetic construct
QVQLQESGPGLVKPSQTLSLTCAVSGFSLTAYGVNWVRQPPGKGLEWLGMIWGDGNTDYNSALKSRLTISKDNSKSQVSLKLSSVTAADTAVYYCARDRVTATLYAMDYWGQGTLVTVSS

SEQ ID NO: 3049 - protein, 120 aa, synthetic construct
QVQLQESGPGLVKPSDTLSLTCTVSGFSLTAYGVNWVRQPPGKGLEWLGMIWGDGNTDYNSALKSRLTISKDNSKSQVSLKLSSVTAADTAVYYCARDRVTATLYAMDYWGQGTLVTVSS

SEQ ID NO: 3050 - protein, 120 aa, synthetic construct
QVQLQESGPGLVKPSQTLSLTCTVSGFSLTAYGVNWVRQHPGKGLEWLGMIWGDGNTDYNSALKSRLTISKDNSKSQVSLKLSSVTAADTAVYYCARDRVTATLYAMDYWGQGTLVTVSS

SEQ ID NO: 3051 - protein, 120 aa, synthetic construct
QVQLQESGPGLVKPSQTLSLTCTVSGFSLTAYGVNWVRQPAGKGLEWLGMIWGDGNTDYNSALKSRLTISKDNSKSQVSLKLSSVTAADTAVYYCARDRVTATLYAMDYWGQGTLVTVSS

SEQ ID NO: 3052 - protein, 120 aa, synthetic construct
QVQLQESGPGLVKPSQTLSLTCAVSGFSLTAYGVNWVRQPPGKGLEWLGMIWGDGNTDYNSALKSRLTISKDNSKSQVSLKLSSVTAVDTAVYYCARDRVTATLYAMDYWGQGTLVTVSS

SEQ ID NO: 3053 - protein, 120 aa, synthetic construct
QVQLQESGPGLVKPSETLSLTCTVSGFSLTAYGVNWVRQPPGKGLEWLGMIWGDGNTDYNSALKSRLTISKDNSKSHVSLKLSSVTAADTAVYYCARDRVTATLYAMDYWGQGTLVTVSS

SEQ ID NO: 3054 - protein, 120 aa, synthetic construct
QVQLQESGPGLVKPSETLSLTCAVSGFSLTAYGVNWVRQPPGKGLEWLGMIWGDGNTDYNSALKSRLTISKDNSKSQVSLKLSSVTAADTAVYYCARDRVTATLYAMDYWGQGTLVTVSS

SEQ ID NO: 3055 - protein, 120 aa, synthetic construct
QVQLQESGPGLVKPSQTLSLTCAVYGFSLTAYGVNWVRQPPGKGLEWLGMIWGDGNTDYNSALKSRLTISKDNSKSQVSLKLSSVTAADTAVYYCARDRVTATLYAMDYWGQGTLVTVSS

SEQ ID NO: 3056 - protein, 120 aa, synthetic construct
RVQLQESGPGLVKPSETLSLTCTVSGFSLTAYGVNWVRQPPGKGLEWLGMIWGDGNTDYNSALKSRLTISKDNSKSQVPLKLSSVTAADTAVYYCARDRVTATLYAMDYWGQGTLVTVSS

SEQ ID NO: 3057 - protein, 120 aa, synthetic construct
QVQLQESGPGLVKPSQTLSLTCTVSGFSLTAYGVNWVRQHPGKGLEWLGMIWGDGNTDYNSALKSLLTISKDNSKSQVSLKLSSVTAADTAVYYCARDRVTATLYAMDYWGQGTLVTVSS

SEQ ID NO: 3058 - protein, 120 aa, synthetic construct
QVQLQESGPGLVKPSDTLSLTCAVSGFSLTAYGVNWVRQPPGKGLEWLGMIWGDGNTDYNSALKSRLTISKDNSKSQVSLKLSSVTALDTAVYYCARDRVTATLYAMDYWGQGTLVTVSS

SEQ ID NO: 3059 - protein, 120 aa, synthetic construct
QVQLQESGPGLVKPSDTLSLTCAVSGFSLTAYGVNWVRQPPGKGLEWLGMIWGDGNTDYNSALKSRLTISKDNSKSQVSLKLSSVTAVDTAVYYCARDRVTATLYAMDYWGQGTLVTVSS

SEQ ID NO: 3060 - protein, 120 aa, synthetic construct
QVQLQESGSGLVKPSQTLSLTCAVSGFSLTAYGVNWVRQPPGKGLEWLGMIWGDGNTDYNSALKSRLTISKDNSKSQVSLKLSSVTAADTAVYYCARDRVTATLYAMDYWGQGTLVTVSS

SEQ ID NO: 3061 - protein, 120 aa, synthetic construct
EVQLVESGGGLVQPGRSLRLSCTVSGFSLTAYGVNWVRQAPGKGLEWLGMIWGDGNTDYNSALKSRLTISKDNSKSIVYLQMNSLKTEDTAVYYCARDRVTATLYAMDYWGQGTLVTVSS

SEQ ID NO: 3062 - protein, 120 aa, synthetic construct
EVQLVESGGGLVQPGPSLRLSCTVSGFSLTAYGVNWVRQAPGKGLEWLGMIWGDGNTDYNSALKSRLTISKDNSKSIVYLQMNSLKTEDTAVYYCARDRVTATLYAMDYWGQGTLVTVSS

SEQ ID NO: 3063 - protein, 120 aa, synthetic construct
QVQLQESGSGLVKPSQTLSLTCAVSGFSLTAYGVNWVRQSPGKGLEWLGMIWGDGNTDYNSALKSRLTISKDNSKSQVSLKLSSVTAADTAVYYCARDRVTATLYAMDYWGQGTLVTVSS

SEQ ID NO: 3064 - protein, 120 aa, synthetic construct
QVQLQESGPGLVKPSETLSLTCTVSGFSLTAYGVNWVRQPAGKGLEWLGMIWGDGNTDYNSALKSRLTISKDNSKSQVSLKLSSVTAADTAVYYCARDRVTATLYAMDYWGQGTLVTVSS

SEQ ID NO: 3065 - protein, 120 aa, synthetic construct
EVQLVESGGGLVKPGRSLRLSCTVSGFSLTAYGVNWVRQAPGKGLEWLGMIWGDGNTDYNSALKSRLTISKDNSKSIVYLQMNSLKTEDTAVYYCARDRVTATLYAMDYWGQGTLVTVSS

SEQ ID NO: 3066 - protein, 120 aa, synthetic construct
QVQLQESGPGLVKPSETLSLTCAVYGFSLTAYGVNWVRQPPGKGLEWLGMIWGDGNTDYNSALKSRLTISKDNSKSQVYLKLSSVTAADTAVYYCARDRVTATLYAMDYWGQGTLVTVSS

SEQ ID NO: 3067 - protein, 120 aa, synthetic construct
QVQLQESGPGLVKPSDTLSLTCAVSGFSLTAYGVNWVRQPPGKGLEWLGMIWGDGNTDYNSALKSRLTISKDNSKSQVSLKLSSVTAVDTGVYYCARDRVTATLYAMDYWGQGTLVTVSS

SEQ ID NO: 3068 - protein, 120 aa, synthetic construct
EVQLVESGGGLVQPGGSLRLSCAVSGFSLTAYGVNWVRQAPGKGLEWLGMIWGDGNTDYNSALKSRLTISKDNSKSSVYLQMNSLKTEDTAVYYCARDRVTATLYAMDYWGQGTLVTVSS

SEQ ID NO: 3069 - protein, 120 aa, synthetic construct
EVQLVESGGGLVKPGGSLRLSCAVSGFSLTAYGVNWVRQAPGKGLEWLGMIWGDGNTDYNSALKSRLTISKDNSKSTVYLQMNSLKTEDTAVYYCARDRVTATLYAMDYWGQGTLVTVSS

SEQ ID NO: 3070 - protein, 120 aa, synthetic construct
QVQLQQSGPGLVKPSQTLSLTCAVSGFSLTAYGVNWVRQSPSRGLEWLGMIWGDGNTDYNSALKSRLTINKDNSKSQVSLQLNSVTPEDTAVYYCARDRVTATLYAMDYWGQGTLVTVSS

SEQ ID NO: 3071 - protein, 120 aa, synthetic construct
QVQLVESGGGLVQPGGSLRLSCSVSGFSLTAYGVNWVRQAPGKGLEWLGMIWGDGNTDYNSALKSRLTISKDNSKSTVYLQMNSLRAEDTAVYYCARDRVTATLYAMDYWGQGTLVTVSS

SEQ ID NO: 3072 - protein, 120 aa, synthetic construct
QVQLQQWGAGLLKPSETLSLTCAVYGFSLTAYGVNWVRQPPGKGLEWLGMIWGDGNTDYNSALKSRLTISKDNSKSQVSLKLSSVTAADTAVYYCARDRVTATLYAMDYWGQGTLVTVSS

SEQ ID NO: 3073 - protein, 120 aa, synthetic construct
QVQLVESGGGVVQPGRSLRLSCAVSGFSLTAYGVNWVRQAPGKGLEWLGMIWGDGNTDYNSALKSRLTISKDNSTSTVFLQMNSLRAEDTAVYYCARDRVTATLYAMDYWGQGTLVTVSS

SEQ ID NO: 3074 - protein, 120 aa, synthetic construct
EVQLVESGGGLVQPGGSLRLSCAVSGFSLTAYGVNWVRQAPGKGLEWLGMIWGDGNTDYNSALKSRLTISKDNSKSTVYLQMNSLRAEDTAVYYCARDRVTATLYAMDYWGQGTLVTVSS

SEQ ID NO: 3075 - protein, 120 aa, synthetic construct
EVQLVESGGGLVQPGGSLRLSCAVSGFSLTAYGVNWVRQAPGKGLEWLGMIWGDGNTDYNSALKSRLTISKDNAKSSVYLQMNSLRDEDTAVYYCARDRVTATLYAMDYWGQGTLVTVSS

SEQ ID NO: 3076 - protein, 120 aa, synthetic construct
EVQLLESGGGLVQPGGSLRLSCAVSGFSLTAYGVNWVRQAPGKGLEWLGMIWGDGNTDYNSALKSRLTISKDNSKSTVYLQMNSLRAEDTAVYYCARDRVTATLYAMDYWGQGTLVTVSS

SEQ ID NO: 3077 - protein, 120 aa, synthetic construct
QVQLVESGGGLVKPGGSLRLSCAVSGFSLTAYGVNWVRQAPGKGLEWLGMIWGDGNTDYNSALKSRLTISKDNAKSSVYLQMNSLRAEDTAVYYCARDRVTATLYAMDYWGQGTLVTVSS

SEQ ID NO: 3078 - protein, 120 aa, synthetic construct
EVQLVESGGGLVQPGGSLKLSCAVSGFSLTAYGVNWVRQASGKGLEWLGMIWGDGNTDYNSALKSRLTISKDNSKSTVYLQMNSLKTEDTAVYYCARDRVTATLYAMDYWGQGTLVTVSS

SEQ ID NO: 3079 - protein, 120 aa, synthetic construct
QVQLLESGGGLVKPGGSLRLSCAVSGFSLTAYGVNWVRQAPGKGLEWLGMIWGDGNTDYNSALKSRLTISKDNAKSSVYLQMNSLRAEDTAVYYCARDRVTATLYAMDYWGQGTLVTVSS

SEQ ID NO: 3080 - protein, 120 aa, synthetic construct
QVQLVESGGGVVQPGRSLRLSCAVSGFSLTAYGVNWVRQAPGKGLEWLGMIWGDGNTDYNSALKSRLTISKDNSKSTVYLQMNSLRAEDTAVYYCARDRVTATLYAMDYWGQGTLVTVSS

SEQ ID NO: 3081 - protein, 120 aa, synthetic construct
QVQLVESGGGVVQPGRSLRLSCAVSGFSLTAYGVNWVRQAPGKGLEWLGMIWGDGNTDYNSALKSRLTISKDNSKSRVYLQMNSLRAEDTAVYYCARDRVTATLYAMDYWGQGTLVTVSS

SEQ ID NO: 3082 - protein, 120 aa, synthetic construct
QVQLVESGGGVVQPGRSLRLSCAVSGFSLTAYGVNWVRQAPGKGLEWLGMIWGDGNTDYNSALKSRLAISKDNSKSTVYLQMNSLRAEDTAVYYCARDRVTATLYAMDYWGQGTLVTVSS

SEQ ID NO: 3083 - protein, 120 aa, synthetic construct
QVQLVESGGGVVQPGGSLRLSCAVSGFSLTAYGVNWVRQAPGKGLEWLGMIWGDGNTDYNSALKSRLTISKDNSKSTVYLQMNSLRAEDTAVYYCARDRVTATLYAMDYWGQGTLVTVSS

SEQ ID NO: 3084 - protein, 120 aa, synthetic construct
EVQLVESGGGLVQPGGSLRLSCAVSGFSLTAYGVNWVRQAPGKGLEWLGMIWGDGNTDYNSALKSRLTISKDNAKSTVYLQMNSLRAEDTAVYYCARDRVTATLYAMDYWGQGTLVTVSS

SEQ ID NO: 3085 - protein, 120 aa, synthetic construct
EVQLVESGGGLVQPGGSLRLSCAVSGFSLTAYGVNWVRQAPGKGLEWLGMIWGDGNTDYNSALKSRLTISKDNAKSSVYLQMNSLRAEDTAVYYCARDRVTATLYAMDYWGQGTLVTVSS

SEQ ID NO: 3086 - protein, 120 aa, synthetic construct
EVQLVESGGVVVQPGGSLRLSCAVSGFSLTAYGVNWVRQAPGKGLEWLGMIWGDGNTDYNSALKSRLTISKDNSKSSVYLQMNSLRTEDTALYYCARDRVTATLYAMDYWGQGTLVTVSS

SEQ ID NO: 3087 - protein, 120 aa, synthetic construct
EVQLVESGGGLVQPGGSLRLSCAVSGFSLTAYGVNWVRQAPGKGLEWLGMIWGDGNTDYNSALKSRLTISKHNSKSTVYLQMNSLRAEDTAVYYCARDRVTATLYAMDYWGQGTLVTVSS

SEQ ID NO: 3088 - protein, 120 aa, synthetic construct
EVQLVESGGGLVKPGGSLRLSCAVSGFSLTAYGVNWVRQAPGKGLEWLGMIWGDGNTDYNSALKSRLTISKDNAKSSVYLQMNSLRAEDTAVYYCARDRVTATLYAMDYWGQGTLVTVSS

SEQ ID NO: 3089 - protein, 120 aa, synthetic construct
EVQLVESGGGLIQPGGSLRLSCAVSGFSLTAYGVNWVRQPPGKGLEWLGMIWGDGNTDYNSALKSRLTISKDNSKSTVYLQMNSLRAEDTAVYYCARDRVTATLYAMDYWGQGTLVTVSS

SEQ ID NO: 3090 - skipped

SEQ ID NO: 3091 - protein, 119 aa, synthetic construct
QVQLQQSGPELVKPGASVKISCKASGYAFSSSWMNWVKQRPGQGLEWIGRIYPGDGDTKYNGKFKGKATLTADKSSSTAYMHLSSLTSVDSAVYFCARRGTGGWYFDVWGAGTTVTVSS

SEQ ID NO: 3092 - protein, 111 aa, synthetic construct
DIVLTQSPASLAVSLGQRATISCRASESVDSSGNSFMHWYQQKPGQPPQLLIYRASNLESGIPARFSGSGSRTDFTLTINPVEADDVATFYCQQSFDDPFTFGSGTKLEIK

SEQ ID NO: 3093 - protein, 111 aa, synthetic construct
DIVLTQSPDSLAVSLGERATINCRASESVDSSGNSFMHWYQQKPGQPPQLLIYRASNLESGVPDRFSGSGSRTDFTLTISSLQAEDVAVYYCQQSFDDPFTFGQGTKLEIK

SEQ ID NO: 3094 - protein, 111 aa, synthetic construct
EIVLTQSPATLSLSPGERATLSCRASESVDSSGNSFMHWYQQKPGQAPQLLIYRASNLESGIPARFSGSGSRTDFTLTISSLEPEDFAVYYCQQSFDDPFTFGQGTKLEIK

SEQ ID NO: 3095 - protein, 111 aa, synthetic construct
EIVLTQSPATLSLSPGERATLSCRASESVDSSGNSFMHWYQQKPGQAPQLLIYRASNLESGIPARFSGSGSRTDFTLTISRLEPEDFAVYYCQQSFDDPFTFGQGTKLEIK

SEQ ID NO: 3096 - protein, 111 aa, synthetic construct
EIVLTQSPATLSLSPGERATLSCRASESVDSSGNSFMHWYQQKPGQAPQLLIYRASNLESGIPARFSGSGSRTDFTLTISSLQPEDFAVYYCQQSFDDPFTFGQGTKLEIK

SEQ ID NO: 3097 - protein, 111 aa, synthetic construct
DIQLTQSPSSLSASVGDRVTITCRASESVDSSGNSFMHWYQQKPGQAPQLLIYRASNLESGVPSRFSGSGSRTDFTLTISSLQPEDVATYYCQQSFDDPFTFGQGTKLEIK

SEQ ID NO: 3098 - protein, 111 aa, synthetic construct
EIVLTQSPATLSLSPGERATLSCRASESVDSSGNSFMHWYQQKPGQAPQLLIYRASNLESGIPARFSGSGPRTDFTLTISSLEPEDFAVYYCQQSFDDPFTFGQGTKLEIK

SEQ ID NO: 3099 - protein, 111 aa, synthetic construct
EIVLTQSPATLSLSPGERATLSCRASESVDSSGNSFMHWYQQKPGQAPQLLIYRASNLESGIPDRFSGSGSRTDFTLTISRLEPEDFAVYYCQQSFDDPFTFGQGTKLEIK

SEQ ID NO: 3100 - protein, 111 aa, synthetic construct
DIQLTQSPSSLSASVGDRVTITCRASESVDSSGNSFMHWYQQKPGKVPQLLIYRASNLESGVPSRFSGSGSRTDFTLTISSLQPEDVATYYCQQSFDDPFTFGQGTKLEIK

SEQ ID NO: 3101 - protein, 111 aa, synthetic construct
DIQLTQSPSSLSASVGDRVTITCRASESVDSSGNSFMHWYQQKPGKTPQLLIYRASNLESGIPSRFSGSGSRTDFTLTIRSLQPEDFATYYCQQSFDDPFTFGQGTKLEIK

SEQ ID NO: 3102 - protein, 111 aa, synthetic construct
EIVLTQSPGTLSLSPGERATLSCRASESVDSSGNSFMHWYQQKPGQAPQLLIYRASNLESGIPDRFSGSGSRTDFTLTISRLEPEDFAVYYCQQSFDDPFTFGQGTKLEIK

SEQ ID NO: 3103 - protein, 111 aa, synthetic construct
EIVLTQSPATLSLSPGERATLSCRASESVDSSGNSFMHWYQQKPGLAPQLLIYRASNLESGIPDRFSGSGSRTDFTLTISRLEPEDFAVYYCQQSFDDPFTFGQGTKLEIK

SEQ ID NO: 3104 - protein, 111 aa, synthetic construct
DIQLTQSPSSLSASVGDRVTITCRASESVDSSGNSFMHWYQQKPGKAPQLLIYRASNLESGVPSRFSGSGSRTDFTLTISSLQPEDFATYYCQQSFDDPFTFGQGTKLEIK

SEQ ID NO: 3105 - protein, 111 aa, synthetic construct
DIQLTQSPSSVSASVGDRVTITCRASESVDSSGNSFMHWYQQKPGKAPQLLIYRASNLESGVPSRFSGSGSRTDFTLTISSLQPEDFATYYCQQSFDDPFTFGQGTKLEIK

SEQ ID NO: 3106 - protein, 111 aa, synthetic construct
AIQLTQSPSSLSASVGDRVTITCRASESVDSSGNSFMHWYQQKPGKAPQLLIYRASNLESGVPSRFSGSGSRTDFTLTISSLQPEDFATYYCQQSFDDPFTFGQGTKLEIK

SEQ ID NO: 3107 - protein, 111 aa, synthetic construct
DIQLTQSPSFLSASVGDRVTITCRASESVDSSGNSFMHWYQQKPGKAPQLLIYRASNLESGVPSRFSGSGSRTEFTLTISSLQPEDFATYYCQQSFDDPFTFGQGTKLEIK

SEQ ID NO: 3108 - protein, 111 aa, synthetic construct
DIQLTQSPSSLSASVGDRVTITCRASESVDSSGNSFMHWYQQKPGKAPQLLIYRASNLESGVPSRFSGSGSRTDFTFTISSLQPEDIATYYCQQSFDDPFTFGQGTKLEIK

SEQ ID NO: 3109 - protein, 111 aa, synthetic construct
EIVLTQSPATLSVSPGERATLSCRASESVDSSGNSFMHWYQQKPGQAPQLLIYRASNLESGIPARFSGSGSRTEFTLTISILQSEDFAVYYCQQSFDDPFTFGQGTKLEIK

SEQ ID NO: 3110 - protein, 111 aa, synthetic construct
EIVLTQSPATLSVSPGERATLSCRASESVDSSGNSFMHWYQQKPGQAPQLLIYRASNLESGIPARFSGSGSRTEFTLTISSLQSEDFAVYYCQQSFDDPFTFGQGTKLEIK

SEQ ID NO: 3111 - protein, 111 aa, synthetic construct
AIRLTQSPFSLSASVGDRVTITCRASESVDSSGNSFMHWYQQKPAKAPQLFIYRASNLESGVPSRFSGSGSRTDFTLTISSLQPEDFATYYCQQSFDDPFTFGQGTKLEIK

SEQ ID NO: 3112 - protein, 111 aa, synthetic construct
DIQLTQSPSSLSASVGDRVTITCRASESVDSSGNSFMHWYQQKPGKAPQSLIYRASNLESGVPSRFSGSGSRTDFTLTISSLQPEDFATYYCQQSFDDPFTFGQGTKLEIK

SEQ ID NO: 3113 - protein, 111 aa, synthetic construct
DIQLTQSPSSLSASVGDRVTITCRASESVDSSGNSFMHWYQQKPGKAPQRLIYRASNLESGVPSRFSGSGSRTEFTLTISNLQPEDFATYYCQQSFDDPFTFGQGTKLEIK

SEQ ID NO: 3114 - protein, 111 aa, synthetic construct
DIQLTQSPSTLSASVGDRVTITCRASESVDSSGNSFMHWYQQKPGKAPQLLIYRASNLESGVPSRFSGSGSRTEFTLTISSLQPDDFATYYCQQSFDDPFTFGQGTKLEIK

SEQ ID NO: 3115 - protein, 111 aa, synthetic construct
EIVLTQSPDFQSVTPKEKVTITCRASESVDSSGNSFMHWYQQKPDQSPQLLIYRASNLESGVPSRFSGSGSRTDFTLTINSLEAEDAATYYCQQSFDDPFTFGQGTKLEIK

SEQ ID NO: 3116 - protein, 111 aa, synthetic construct
DIQLTQSPSSLSASVGDRVTITCRASESVDSSGNSFMHWYQQKPGKAPQSLIYRASNLESGVPSKFSGSGSRTDFTLTISSLQPEDFATYYCQQSFDDPFTFGQGTKLEIK

SEQ ID NO: 3117 - protein, 111 aa, synthetic construct
DIQLTQSPSSLSASVGDRVTITCRASESVDSSGNSFMHWYQQKPGKAPQRLIYRASNLESGVPSRFSGSGSRTEFTLTISSLQPEDFATYYCQQSFDDPFTFGQGTKLEIK

SEQ ID NO: 3118 - protein, 111 aa, synthetic construct
DIVLTQTPLSLSVTPGQPASISCRASESVDSSGNSFMHWYLQKPGQPPQLLIYRASNLESGVPDRFSGSGSRTDFTLKISRVEAEDVGVYYCQQSFDDPFTFGQGTKLEIK

SEQ ID NO: 3119 - protein, 111 aa, synthetic construct
DIQLTQSPSSLSASVGDRVTITCRASESVDSSGNSFMHWYQQKPEKAPQSLIYRASNLESGVPSRFSGSGSRTDFTLTISSLQPEDFATYYCQQSFDDPFTFGQGTKLEIK

SEQ ID NO: 3120 - protein, 111 aa, synthetic construct
EIVLTQSPPTLSLSPGERVTLSCRASESVDSSGNSFMHWYQQKPGQAPQLLIYRASNLESGIPARFSGSGSRTDFTLTISSLQPEDFAVYYCQQSFDDPFTFGQGTKLEIK

SEQ ID NO: 3121 - protein, 111 aa, synthetic construct
DIQLTQSPSAMSASVGDRVTITCRASESVDSSGNSFMHWYQQKPGKVPQRLIYRASNLESGVPSRFSGSGSRTEFTLTISSLQPEDFATYYCQQSFDDPFTFGQGTKLEIK

SEQ ID NO: 3122 - protein, 111 aa, synthetic construct
DIVLTQSPLSLPVTPGEPASISCRASESVDSSGNSFMHWYLQKPGQSPQLLIYRASNLESGVPDRFSGSGSRTDFTLKISRVEAEDVGVYYCQQSFDDPFTFGQGTKLEIK

SEQ ID NO: 3123 - protein, 111 aa, synthetic construct
DIVLTQTPLSLPVTPGEPASISCRASESVDSSGNSFMHWYLQKPGQSPQLLIYRASNLESGVPDRFSGSGSRTDFTLKISRVEAEDVGVYYCQQSFDDPFTFGQGTKLEIK

SEQ ID NO: 3124 - protein, 111 aa, synthetic construct
DIVLTQTPLSLSVTPGQPASISCRASESVDSSGNSFMHWYLQKPGQSPQLLIYRASNLESGVPDRFSGSGSRTDFTLKISRVEAEDVGVYYCQQSFDDPFTFGQGTKLEIK

SEQ ID NO: 3125 - protein, 111 aa, synthetic construct
EIVLTQSPPTLSLSPGERVTLSCRASESVDSSGNSFMHWYQQKPGQAPQLLIYRASNLESSIPARFSGSGSRTDFTLTISSLQPEDFAVYYCQQSFDDPFTFGQGTKLEIK

SEQ ID NO: 3126 - protein, 111 aa, synthetic construct
DIVLTQSPLSLPVTLGQPASISCRASESVDSSGNSFMHWYQQRPGQSPQRLIYRASNLESGVPDRFSGSGSRTDFTLKISRVEAEDVGVYYCQQSFDDPFTFGQGTKLEIK

SEQ ID NO: 3127 - protein, 111 aa, synthetic construct
DIVLTQTPLSSPVTLGQPASISCRASESVDSSGNSFMHWYQQRPGQPPQLLIYRASNLESGVPDRFSGSGARTDFTLKISRVEAEDVGVYYCQQSFDDPFTFGQGTKLEIK

SEQ ID NO: 3128 - protein, 111 aa, synthetic construct
DIVLTQSPAFLSVTPGEKVTITCRASESVDSSGNSFMHWYQQKPDQAPQLLIYRASNLESGVPSRFSGSGSRTDFTFTISSLEAEDAATYYCQQSFDDPFTFGQGTKLEIK

SEQ ID NO: 3129 - protein, 111 aa, synthetic construct
DIQLIQSPSFLSASVGDRVSIICRASESVDSSGNSFMHWYLQKPGKSPQLFIYRASNLESGVSSRFSGRGSRTDFTLTIISLKPEDFAAYYCQQSFDDPFTFGQGTKLEIK

SEQ ID NO: 3130 - protein, 111 aa, synthetic construct
EIVLTQTPLSLSITPGEQASISCRASESVDSSGNSFMHWYLQKARPVPQLLIYRASNLESGVPDRFSGSGSRTDFTLKISRVEAEDFGVYYCQQSFDDPFTFGQGTKLEIK

SEQ ID NO: 3131 - protein, 111 aa, synthetic construct
EIVLTQTPLSLSITPGEQASMSCRASESVDSSGNSFMHWYLQKARPVPQLLIYRASNLESGVPDRFSGSGSRTDFTLKISRVEAEDFGVYYCQQSFDDPFTFGQGTKLEIK

SEQ ID NO: 3132 - protein, 111 aa, synthetic construct
EITLTQSPAFMSATPGDKVNISCRASESVDSSGNSFMHWYQQKPGEAPQFIIYRASNLESGIPPRFSGSGYRTDFTLTINNIESEDAAYYYCQQSFDDPFTFGQGTKLEIK

SEQ ID NO: 3133 - protein, 119 aa, synthetic construct
QVQLVQSGAEVKKPGASVKVSCKASGYAFSSSWMNWVRQAPGQGLEWIGRIYPGDGDTKYNGKFKGRATLTADKSTSTAYMELSSLRSEDTAVYYCARRGTGGWYFDVWGQGTTVTVSS

SEQ ID NO: 3134 - protein, 119 aa, synthetic construct
QVQLVQSGAEVKKPGSSVKVSCKASGYAFSSSWMNWVRQAPGQGLEWIGRIYPGDGDTKYNGKFKGRATLTADKSTSTAYMELSSLRSEDTAVYYCARRGTGGWYFDVWGQGTTVTVSS

SEQ ID NO: 3135 - protein, 119 aa, synthetic construct
QVQLVQSGAEVKKPGASVKVSCKASGYAFSSSWMNWVRQAPGKGLEWIGRIYPGDGDTKYNGKFKGRATLTADKSTSTAYMELSSLRSEDTAVYYCARRGTGGWYFDVWGQGTTVTVSS

SEQ ID NO: 3136 - protein, 119 aa, synthetic construct
QVQLVQSGAEVKKPGASVKVSCKASGYAFSSSWMNWVRQAPGQELEWIGRIYPGDGDTKYNGKFKGRATLTADKSISTAYMELSSLRSEDTATYYCARRGTGGWYFDVWGQGTTVTVSS

SEQ ID NO: 3137 - protein, 119 aa, synthetic construct
EVQLVQSGAEVKKPGATVKISCKASGYAFSSSWMNWVQQAPGKGLEWIGRIYPGDGDTKYNGKFKGRATLTADKSTSTAYMELSSLRSEDTAVYYCARRGTGGWYFDVWGQGTTVTVSS

SEQ ID NO: 3138 - protein, 119 aa, synthetic construct
QVQLVQSGAEVKKTGSSVKVSCKASGYAFSSSWMNWVRQAPGQALEWIGRIYPGDGDTKYNGKFKGRATLTADKSMSTAYMELSSLRSEDTAMYYCARRGTGGWYFDVWGQGTTVTVSS

SEQ ID NO: 3139 - protein, 119 aa, synthetic construct
QVQLVQSGAEVKKPGASVKVSCKASGYAFSSSWMNWVRQAPGQRLEWIGRIYPGDGDTKYNGKFKGRATLTADKSASTAYMELSSLRSEDMAVYYCARRGTGGWYFDVWGQGTTVTVSS

SEQ ID NO: 3140 - protein, 119 aa, synthetic construct
QVQLVQSGAEVKKPGASVKVSCKASGYAFSSSWMNWVRQAPGQGLEWIGRIYPGDGDTKYNGKFKGRATLTADKSTSTAYMELRSLRSDDMAVYYCARRGTGGWYFDVWGQGTTVTVSS

SEQ ID NO: 3141 - protein, 119 aa, synthetic construct
QVQLVQSGAEVKKPGASVKVSCKASGYAFSSSWMNWVRQAPGQRLEWIGRIYPGDGDTKYNGKFKGRATLTADKSASTAYMELSSLRSEDTAVYYCARRGTGGWYFDVWGQGTTVTVSS

SEQ ID NO: 3142 - protein, 119 aa, synthetic construct
QVQLVQSGAEVKKPGASVKVSCKASGYAFSSSWMNWVRQAPGQGLEWIGRIYPGDGDTKYNGKFKGRATLTADKSTSTAYMELRSLRSDDTAVYYCARRGTGGWYFDVWGQGTTVTVSS

SEQ ID NO: 3143 - protein, 119 aa, synthetic construct
QVQLVQSGAEVKKPGASVKVSCKASGYAFSSSWMNWVRQAPGQGLEWIGRIYPGDGDTKYNGKFKGRATLTADKSISTAYMELSRLRSDDTAVYYCARRGTGGWYFDVWGQGTTVTVSS

SEQ ID NO: 3144 - protein, 119 aa, synthetic construct
QVQLVQSGAEVKKPGASVKVSCKASGYAFSSSWMNWVRQAPGQGLEWIGRIYPGDGDTKYNGKFKGRATLTADKSISTAYMELSRLRSDDTVVYYCARRGTGGWYFDVWGQGTTVTVSS

SEQ ID NO: 3145 - protein, 119 aa, synthetic construct
QVQLVQSGAEVKKPGASVKVSCKASGYAFSSSWMNWVRQAPGQGLEWIGRIYPGDGDTKYNGKFKGWATLTADKSISTAYMELSRLRSDDTAVYYCARRGTGGWYFDVWGQGTTVTVSS

SEQ ID NO: 3146 - protein, 119 aa, synthetic construct
QVQLVQSGAEVKKPGASVKVSCKASGYAFSSSWMNWVRQATGQGLEWIGRIYPGDGDTKYNGKFKGRATLTANKSISTAYMELSSLRSEDTAVYYCARRGTGGWYFDVWGQGTTVTVSS

SEQ ID NO: 3147 - protein, 119 aa, synthetic construct
QVQLVQSGSELKKPGASVKVSCKASGYAFSSSWMNWVRQAPGQGLEWIGRIYPGDGDTKYNGKFKGRAVLSADKSVSTAYLQISSLKAEDTAVYYCARRGTGGWYFDVWGQGTTVTVSS

SEQ ID NO: 3148 - protein, 119 aa, synthetic construct
QVQLVQSGPEVKKPGTSVKVSCKASGYAFSSSWMNWVRQARGQRLEWIGRIYPGDGDTKYNGKFKGRATLTADKSTSTAYMELSSLRSEDTAVYYCARRGTGGWYFDVWGQGTTVTVSS

SEQ ID NO: 3149 - protein, 119 aa, synthetic construct
EVQLVQSGAEVKKPGESLKISCKASGYAFSSSWMNWVRQMPGKGLEWIGRIYPGDGDTKYNGKFKGQATLSADKSISTAYLQWSSLKASDTAMYYCARRGTGGWYFDVWGQGTTVTVSS

SEQ ID NO: 3150 - protein, 119 aa, synthetic construct
QVQLVQSGSELKKPGASVKVSCKASGYAFSSSWMNWVRQAPGQGLEWIGRIYPGDGDTKYNGKFKGRAVLSADKSVSMAYLQISSLKAEDTAVYYCARRGTGGWYFDVWGQGTTVTVSS

SEQ ID NO: 3151 - protein, 119 aa, synthetic construct
QVQLVQSGHEVKQPGASVKVSCKASGYAFSSSWMNWVPQAPGQGLEWIGRIYPGDGDTKYNGKFKGRAVLSADKSASTAYLQISSLKAEDMAMYYCARRGTGGWYFDVWGQGTTVTVSS

SEQ ID NO: 3152 - protein, 119 aa, synthetic construct
EVQLVQSGAEVKKPGESLKISCKASGYAFSSSWMNWVRQMPGKGLEWIGRIYPGDGDTKYNGKFKGQATLSADKPISTAYLQWSSLKASDTAMYYCARRGTGGWYFDVWGQGTTVTVSS

SEQ ID NO: 3153 - protein, 119 aa, synthetic construct
EVQLVQSGAEVKKPGESLRISCKASGYAFSSSWMNWVRQMPGKGLEWIGRIYPGDGDTKYNGKFKGQATLSADKSISTAYLQWSSLKASDTAMYYCARRGTGGWYFDVWGQGTTVTVSS

SEQ ID NO: 3154 - protein, 119 aa, synthetic construct
EVQLVQSGAEVKKPGESLRISCKASGYAFSSSWMNWVRQMPGKGLEWIGRIYPGDGDTKYNGKFKGHATLSADKSISTAYLQWSSLKASDTAMYYCARRGTGGWYFDVWGQGTTVTVSS

SEQ ID NO: 3155 - protein, 119 aa, synthetic construct
QVQLVQSGAEVKKTGSSVKVSCKASGYAFSSSWMNWVRQAPRQALEWIGRIYPGDGDTKYNGKFKGRATLTADKSMSTAYMELSSLRSEDTAMYYCARRGTGGWYFDVWGQGTTVTVSS

SEQ ID NO: 3156 - protein, 119 aa, synthetic construct
EVQLVESGGGLVQPGRSLRLSCTASGYAFSSSWMNWVRQAPGKGLEWIGRIYPGDGDTKYNGKFKGRATLSADKSKSIAYLQMNSLKTEDTAVYYCARRGTGGWYFDVWGQGTTVTVSS

SEQ ID NO: 3157 - protein, 119 aa, synthetic construct
EVQLVESGGGLVQPGPSLRLSCTASGYAFSSSWMNWVRQAPGKGLEWIGRIYPGDGDTKYNGKFKGRATLSADKSKSIAYLQMNSLKTEDTAVYYCARRGTGGWYFDVWGQGTTVTVSS

SEQ ID NO: 3158 - protein, 119 aa, synthetic construct
QVQLQESGPGLVKPSQTLSLTCTASGYAFSSSWMNWVRQPPGKGLEWIGRIYPGDGDTKYNGKFKGRATLSADKSKSQASLKLSSVTAADTAVYYCARRGTGGWYFDVWGQGTTVTVSS

SEQ ID NO: 3159 - protein, 119 aa, synthetic construct
QVQLQESGPGLVKPSGTLSLTCAASGYAFSSSWMNWVRQPPGKGLEWIGRIYPGDGDTKYNGKFKGRATLSADKSKSQASLKLSSVTAADTAVYYCARRGTGGWYFDVWGQGTTVTVSS

SEQ ID NO: 3160 - protein, 119 aa, synthetic construct
EVQLVESGGGLVKPGRSLRLSCTASGYAFSSSWMNWVRQAPGKGLEWIGRIYPGDGDTKYNGKFKGRATLSADKSKSIAYLQMNSLKTEDTAVYYCARRGTGGWYFDVWGQGTTVTVSS

SEQ ID NO: 3161 - protein, 119 aa, synthetic construct
EVQLVESGGGLVQPGGSLKLSCAASGYAFSSSWMNWVRQASGKGLEWIGRIYPGDGDTKYNGKFKGRATLSADKSKSTAYLQMNSLKTEDTAVYYCARRGTGGWYFDVWGQGTTVTVSS

SEQ ID NO: 3162 - protein, 119 aa, synthetic construct
QVQLQESGPGLVKPSQTLSLTCAASGYAFSSSWMNWVRQPPGKGLEWIGRIYPGDGDTKYNGKFKGRATLSADKSKSQASLKLSSVTAADTAVYYCARRGTGGWYFDVWGQGTTVTVSS

SEQ ID NO: 3163 - protein, 119 aa, synthetic construct
EVQLVESGGGLVKPGGSLRLSCAASGYAFSSSWMNWVRQAPGKGLEWIGRIYPGDGDTKYNGKFKGRATLSADKSKSTAYLQMNSLKTEDTAVYYCARRGTGGWYFDVWGQGTTVTVSS

SEQ ID NO: 3164 - protein, 119 aa, synthetic construct
EVQLVESGGALVKPGGSLRLSCAASGYAFSSSWMNWVRQAPGKGLEWIGRIYPGDGDTKYNGKFKGRATLSADKSKSTAYLQMNSLKTEDTAVYYCARRGTGGWYFDVWGQGTTVTVSS

SEQ ID NO: 3165 - protein, 119 aa, synthetic construct
QVQLQESGPGLVKPSQTLSLTCAAYGYAFSSSWMNWVRQPPGKGLEWIGRIYPGDGDTKYNGKFKGRATLSADKSKSQASLKLSSVTAADTAVYYCARRGTGGWYFDVWGQGTTVTVSS

SEQ ID NO: 3166 - protein, 119 aa, synthetic construct
QVQLQESGSGLVKPSQTLSLTCAASGYAFSSSWMNWVRQPPGKGLEWIGRIYPGDGDTKYNGKFKGRATLSADKSKSQASLKLSSVTAADTAVYYCARRGTGGWYFDVWGQGTTVTVSS

SEQ ID NO: 3167 - protein, 119 aa, synthetic construct
EVQLVESGGGLVQPGGSLRLSCAASGYAFSSSWMNWVRQAPGKGLEWIGRIYPGDGDTKYNGKFKGRATLSADKSKSSAYLQMNSLKTEDTAVYYCARRGTGGWYFDVWGQGTTVTVSS

SEQ ID NO: 3168 - protein, 119 aa, synthetic construct
QVQLQESGPGLVKPSDTLSLTCTASGYAFSSSWMNWVRQPPGKGLEWIGRIYPGDGDTKYNGKFKGRATLSADKSKSQASLKLSSVTAADTAVYYCARRGTGGWYFDVWGQGTTVTVSS

SEQ ID NO: 3169 - protein, 119 aa, synthetic construct
QVQLQESGPGLVKPSQTLSLTCTASGYAFSSSWMNWVRQHPGKGLEWIGRIYPGDGDTKYNGKFKGRATLSADKSKSQASLKLSSVTAADTAVYYCARRGTGGWYFDVWGQGTTVTVSS

SEQ ID NO: 3170 - protein, 119 aa, synthetic construct
QVQLQESGPGLVKPSQTLSLTCTASGYAFSSSWMNWVRQHPGKGLEWIGRIYPGDGDTKYNGKFKGLATLSADKSKSQASLKLSSVTAADTAVYYCARRGTGGWYFDVWGQGTTVTVSS

SEQ ID NO: 3171 - protein, 119 aa, synthetic construct
QVQLVESGGGVVQPGRSLRLSCAASGYAFSSSWMNWVRQAPGKGLEWIGRIYPGDGDTKYNGKFKGRATLSADKSKSTAYLQMSSLRAEDTAVYYCARRGTGGWYFDVWGQGTTVTVSS

SEQ ID NO: 3172 - protein, 119 aa, synthetic construct
QVQLVESGGGLVKPGGSLRLSCAASGYAFSSSWMNWVRQAPGKGLEWIGRIYPGDGDTKYNGKFKGRATLSADKAKSSAYLQMNSLRAEDTAVYYCARRGTGGWYFDVWGQGTTVTVSS

SEQ ID NO: 3173 - protein, 119 aa, synthetic construct
QVQLVESGGGLVQPGGSLRLSCSASGYAFSSSWMNWVRQAPGKGLEWIGRIYPGDGDTKYNGKFKGRATLSADKSKSTAYLQMNSLRAEDTAVYYCARRGTGGWYFDVWGQGTTVTVSS

SEQ ID NO: 3174 - protein, 119 aa, synthetic construct
QVQLLESGGGLVKPGGSLRLSCAASGYAFSSSWMNWVRQAPGKGLEWIGRIYPGDGDTKYNGKFKGRATLSADKAKSSAYLQMNSLRAEDTAVYYCARRGTGGWYFDVWGQGTTVTVSS

SEQ ID NO: 3175 - protein, 119 aa, synthetic construct
EVQLVESGGGLVQPGGSLRLSCSASGYAFSSSWMNWVRQAPGKGLEWIGRIYPGDGDTKYNGKFKGRATLSADKSKSTAYLQMSSLRAEDTAVYYCARRGTGGWYFDVWGQGTTVTVSS

SEQ ID NO: 3176 - protein, 119 aa, synthetic construct
QVQLQESGPGLVKPSDTLSLTCAASGYAFSSSWMNWVRQPPGKGLEWIGRIYPGDGDTKYNGKFKGRATLSADKSKSQASLKLSSVTAVDTAVYYCARRGTGGWYFDVWGQGTTVTVSS

SEQ ID NO: 3177 - protein, 119 aa, synthetic construct
QVQLQESGPGLVKPSQTLSLTCAASGYAFSSSWMNWVRQPPGKGLEWIGRIYPGDGDTKYNGKFKGRATLSADKSKSQASLKLSSVTAVDTAVYYCARRGTGGWYFDVWGQGTTVTVSS

SEQ ID NO: 3178 - protein, 119 aa, synthetic construct
EVQLVESGGGLVQPGGSLRLSCSASGYAFSSSWMNWVRQAPGKGLEWIGRIYPGDGDTKYNGKFKGRATLSADKSKSTAYVQMSSLRAEDTAVYYCARRGTGGWYFDVWGQGTTVTVSS

SEQ ID NO: 3179 - protein, 119 aa, synthetic construct
QVQLVDSGGGVVQPGRSLRLSCAASGYAFSSSWMNWVRQAPGKGLEWIGRIYPGDGDTKYNGKFKGRATLSADKSKSTAYLQMNSLRAEDTAVYYCARRGTGGWYFDVWGQGTTVTVSS

SEQ ID NO: 3180 - protein, 119 aa, synthetic construct
QVQLVESGGGVVQPGRSLRLSCAASGYAFSSSWMNWVRQAPGKGLEWIGRIYPGDGDTKYNGKFKGRATLSADKSKSTAYLQMNSLRAEGTAVYYCARRGTGGWYFDVWGQGTTVTVSS

SEQ ID NO: 3181 - protein, 119 aa, synthetic construct
QVQLVESGGGVVQPGRSLRLSCAASGYAFSSSWMNWVRQAPGKGLEWIGRIYPGDGDTKYNGKFKGRATLSADKSKSTAYLQMNSLRAEDTAVYYCARRGTGGWYFDVWGQGTTVTVSS

SEQ ID NO: 3182 - protein, 119 aa, synthetic construct
EVQLVESGGGLVQPGGSLRLSCAASGYAFSSSWMNWVRQAPGKGLEWIGRIYPGDGDTKYNGKFKGRATLSADKSKSTAYLQMNSLRAEDTAVYYCARRGTGGWYFDVWGQGTTVTVSS

SEQ ID NO: 3183 - protein, 117 aa, synthetic construct
EVQLVESGGDLVKPGGSLKLSCAVSGFTFRSYGMSWVRQTPDKRLEWVALISSGGSYTYYTDSVKGRFTISRDNAKNTLYLQMSSLKSEDTAIYYCSRHGGNFFDYWGQGTTLTVSS

SEQ ID NO: 3184 - protein, 107 aa, synthetic construct
QIVLTQSPSIMSASPGEKVTMTCSVSSSVSYMHWYQQKSGTSPKRWIYDTSKLASGVPARFSGSGSGTSYSLTISSMEAEDAATYYCQQWSSNPQYTFGGGTKLEIK

SEQ ID NO: 3185 - protein, 107 aa, synthetic construct
DIVLTQSPAFLSVTPGEKVTITCSVSSSVSYMHWYQQKPDQAPKLLIYDTSKLASGVPSRFSGSGSGTDYTFTISSLEAEDAATYYCQQWSSNPQYTFGQGTKLEIK

SEQ ID NO: 3186 - protein, 107 aa, synthetic construct
AIQLTQSPSSLSASVGDRVTITCSVSSSVSYMHWYQQKPGKAPKLLIYDTSKLASGVPSRFSGSGSGTDYTLTISSLQPEDFATYYCQQWSSNPQYTFGQGTKLEIK

SEQ ID NO: 3187 - protein, 107 aa, synthetic construct
DIQLTQSPSFLSASVGDRVTITCSVSSSVSYMHWYQQKPGKAPKLLIYDTSKLASGVPSRFSGSGSGTEYTLTISSLQPEDFATYYCQQWSSNPQYTFGQGTKLEIK

SEQ ID NO: 3188 - protein, 107 aa, synthetic construct
DIQLTQSPSSLSASVGDRVTITCSVSSSVSYMHWYQQKPGKAPKLLIYDTSKLASGVPSRFSGSGSGTDYTLTISSLQPEDFATYYCQQWSSNPQYTFGQGTKLEIK

SEQ ID NO: 3189 - protein, 107 aa, synthetic construct
DIQLTQSPSSVSASVGDRVTITCSVSSSVSYMHWYQQKPGKAPKLLIYDTSKLASGVPSRFSGSGSGTDYTLTISSLQPEDFATYYCQQWSSNPQYTFGQGTKLEIK

SEQ ID NO: 3190 - protein, 107 aa, synthetic construct
DIQLTQSPSSLSASVGDRVTITCSVSSSVSYMHWYQQKPGKVPKLLIYDTSKLASGVPSRFSGSGSGTDYTLTISSLQPEDVATYYCQQWSSNPQYTFGQGTKLEIK

SEQ ID NO: 3191 - protein, 107 aa, synthetic construct
DIQLTQSPSSLSASVGDRVTITCSVSSSVSYMHWYQQKPGQAPKLLIYDTSKLASGVPSRFSGSGSGTDYTLTISSLQPEDVATYYCQQWSSNPQYTFGQGTKLEIK

SEQ ID NO: 3192 - protein, 107 aa, synthetic construct
EIVLTQSPDFQSVTPKEKVTITCSVSSSVSYMHWYQQKPDQSPKLLIYDTSKLASGVPSRFSGSGSGTDYTLTINSLEAEDAATYYCQQWSSNPQYTFGQGTKLEIK

SEQ ID NO: 3193 - protein, 107 aa, synthetic construct
AIRLTQSPFSLSASVGDRVTITCSVSSSVSYMHWYQQKPAKAPKLFIYDTSKLASGVPSRFSGSGSGTDYTLTISSLQPEDFATYYCQQWSSNPQYTFGQGTKLEIK

SEQ ID NO: 3194 - protein, 107 aa, synthetic construct
DIQLTQSPSSLSASVGDRVTITCSVSSSVSYMHWYQQKPGKAPKLLIYDTSKLASGVPSRFSGSGSGTDYTFTISSLQPEDIATYYCQQWSSNPQYTFGQGTKLEIK

SEQ ID NO: 3195 - protein, 107 aa, synthetic construct
EIVLTQSPATLSLSPGERATLSCSVSSSVSYMHWYQQKPGQAPKLLIYDTSKLASGIPARFSGSGSGTDYTLTISSLEPEDFAVYYCQQWSSNPQYTFGQGTKLEIK

SEQ ID NO: 3196 - protein, 107 aa, synthetic construct
DIQLTQSPSTLSASVGDRVTITCSVSSSVSYMHWYQQKPGKAPKLLIYDTSKLASGVPSRFSGSGSGTEYTLTISSLQPDDFATYYCQQWSSNPQYTFGQGTKLEIK

SEQ ID NO: 3197 - protein, 107 aa, synthetic construct
DIQLTQSPSSLSASVGDRVTITCSVSSSVSYMHWYQQKPGKTPKLLIYDTSKLASGIPSRFSGSGSGTDYTLTIRSLQPEDFATYYCQQWSSNPQYTFGQGTKLEIK

SEQ ID NO: 3198 - protein, 107 aa, synthetic construct
EIVLTQSPPTLSLSPGERVTLSCSVSSSVSYMHWYQQKPGQAPKLLIYDTSKLASGIPARFSGSGSGTDYTLTISSLQPEDFAVYYCQQWSSNPQYTFGQGTKLEIK

SEQ ID NO: 3199 - protein, 107 aa, synthetic construct
DIQLTQSPSSLSASVGDRVTITCSVSSSVSYMHWYQQKPGKAPKRLIYDTSKLASGVPSRFSGSGSGTEYTLTISSLQPEDFATYYCQQWSSNPQYTFGQGTKLEIK

SEQ ID NO: 3200 - protein, 107 aa, synthetic construct
EIVLTQSPATLSLSPGERATLSCSVSSSVSYMHWYQQKPGQAPKLLIYDTSKLASGIPARFSGSGPGTDYTLTISSLEPEDFAVYYCQQWSSNPQYTFGQGTKLEIK

SEQ ID NO: 3201 - protein, 107 aa, synthetic construct
EIVLTQSPATLSLSPGERATLSCSVSSSVSYMHWYQQKPGQAPKLLIYDTSKLASGIPARFSGSGSGTDYTLTISRLEPEDFAVYYCQQWSSNPQYTFGQGTKLEIK

SEQ ID NO: 3202 - protein, 107 aa, synthetic construct
EIVLTQSPATLSLSPGERATLSCSVSSSVSYMHWYQQKPGQAPKLLIYDTSKLASGIPARFSGSGSGTDYTLTISSLQPEDFAVYYCQQWSSNPQYTFGQGTKLEIK

SEQ ID NO: 3203 - protein, 107 aa, synthetic construct
EIVLTQSPATLSVSPGERATLSCSVSSSVSYMHWYQQKPGQAPKLLIYDTSKLASGIPARFSGSGSGTEYTLTISSLQSEDFAVYYCQQWSSNPQYTFGQGTKLEIK

SEQ ID NO: 3204 - protein, 107 aa, synthetic construct
EIVLTQSPATLSVSPGERATLSCSVSSSVSYMHWYQQKPGQAPKLLIYDTSKLASGIPARFSGSGSGTEYTLTISILQSEDFAVYYCQQWSSNPQYTFGQGTKLEIK

SEQ ID NO: 3205 - protein, 107 aa, synthetic construct
EIVLTQSPPTLSLSPGERVTLSCSVSSSVSYMHWYQQKPGQAPKLLIYDTSKLASSIPARFSGSGSGTDYTLTISSLQPEDFAVYYCQQWSSNPQYTFGQGTKLEIK

SEQ ID NO: 3206 - protein, 107 aa, synthetic construct
DIQLTQSPSSLSASVGDRVTITCSVSSSVSYMHWYQQKPGKAPKSLIYDTSKLASGVPSRFSGSGSGTDYTLTISSLQPEDFATYYCQQWSSNPQYTFGQGTKLEIK

SEQ ID NO: 3207 - protein, 107 aa, synthetic construct
DIQLTQSPSSLSASVGDRVTITCSVSSSVSYMHWYQQKPGKAPKRLIYDTSKLASGVPSRFSGSGSGTEYTLTISNLQPEDFATYYCQQWSSNPQYTFGQGTKLEIK

SEQ ID NO: 3208 - protein, 107 aa, synthetic construct
DIQLTQSPSAMSASVGDRVTITCSVSSSVSYMHWYQQKPGKVPKRLIYDTSKLASGVPSRFSGSGSGTEYTLTISSLQPEDFATYYCQQWSSNPQYTFGQGTKLEIK

SEQ ID NO: 3209 - protein, 107 aa, synthetic construct
EIVLTQSPATLSLSPGERATLSCSVSSSVSYMHWYQQKPGQAPKLLIYDTSKLASGIPDRFSGSGSGTDYTLTISRLEPEDFAVYYCQQWSSNPQYTFGQGTKLEIK

SEQ ID NO: 3210 - protein, 107 aa, synthetic construct
EIVLTQSPATLSLSPGERATLSCSVSSSVSYMHWYQQKPGLAPKLLIYDTSKLASGIPDRFSGSGSGTDYTLTISRLEPEDFAVYYCQQWSSNPQYTFGQGTKLEIK

SEQ ID NO: 3211 - protein, 107 aa, synthetic construct
EIVLTQSPGTLSLSPGERATLSCSVSSSVSYMHWYQQKPGQAPKLLIYDTSKLASGIPDRFSGSGSGTDYTLTISRLEPEDFAVYYCQQWSSNPQYTFGQGTKLEIK

SEQ ID NO: 3212 - protein, 107 aa, synthetic construct
DIQLTQSPSSLSASVGDRVTITCSVSSSVSYMHWYQQKPGKAPKSLIYDTSKLASGVPSKFSGSGSGTDYTLTISSLQPEDFATYYCQQWSSNPQYTFGQGTKLEIK

SEQ ID NO: 3213 - protein, 107 aa, synthetic construct
DIQLTQSPSSLSASVGDRVTITCSVSSSVSYMHWYQQKPEKAPKSLIYDTSKLASGVPSRFSGSGSGTDYTLTISSLQPEDFATYYCQQWSSNPQYTFGQGTKLEIK

SEQ ID NO: 3214 - protein, 107 aa, synthetic construct
DIVLTQSPDSLAVSLGERATINCSVSSSVSYMHWYQQKPGQPPKLLIYDTSKLASGVPDRFSGSGSGTDYTLTISSLQAEDVAVYYCQQWSSNPQYTFGQGTKLEIK

SEQ ID NO: 3215 - protein, 107 aa, synthetic construct
EIVLTQTPLSLSITPGEQASMSCSVSSSVSYMHWYLQKARPVPKLLIYDTSKLASGVPDRFSGSGSGTDYTLKISRVEAEDFGVYYCQQWSSNPQYTFGQGTKLEIK

SEQ ID NO: 3216 - protein, 107 aa, synthetic construct
EIVLTQTPLSLSITPGEQASISCSVSSSVSYMHWYLQKARPVPKLLIYDTSKLASGVPDRFSGSGSGTDYTLKISRVEAEDFGVYYCQQWSSNPQYTFGQGTKLEIK

SEQ ID NO: 3217 - protein, 107 aa, synthetic construct
DIVLTQSPLSLPVTPGEPASISCSVSSSVSYMHWYLQKPGQSPKLLIYDTSKLASGVPDRFSGSGSGTDYTLKISRVEAEDVGVYYCQQWSSNPQYTFGQGTKLEIK

SEQ ID NO: 3218 - protein, 107 aa, synthetic construct
DIVLTQSPLSLPVTLGQPASISCSVSSSVSYMHWYQQRPGQSPKRLIYDTSKLASGVPDRFSGSGSGTDYTLKISRVEAEDVGVYYCQQWSSNPQYTFGQGTKLEIK

SEQ ID NO: 3219 - protein, 107 aa, synthetic construct
DIVLTQTPLSLPVTPGEPASISCSVSSSVSYMHWYLQKPGQSPKLLIYDTSKLASGVPDRFSGSGSGTDYTLKISRVEAEDVGVYYCQQWSSNPQYTFGQGTKLEIK

SEQ ID NO: 3220 - protein, 107 aa, synthetic construct
DIVLTQTPLSLSVTPGQPASISCSVSSSVSYMHWYLQKPGQSPKLLIYDTSKLASGVPDRFSGSGSGTDYTLKISRVEAEDVGVYYCQQWSSNPQYTFGQGTKLEIK

SEQ ID NO: 3221 - protein, 107 aa, synthetic construct
DIVLTQTPLSLSVTPGQPASISCSVSSSVSYMHWYLQKPGQPPKLLIYDTSKLASGVPDRFSGSGSGTDYTLKISRVEAEDVGVYYCQQWSSNPQYTFGQGTKLEIK

SEQ ID NO: 3222 - protein, 107 aa, synthetic construct
DIQLIQSPSFLSASVGDRVSIICSVSSSVSYMHWYLQKPGKSPKLFIYDTSKLASGVSSRFSGRGSGTDYTLTIISLKPEDFAAYYCQQWSSNPQYTFGQGTKLEIK

SEQ ID NO: 3223 - protein, 107 aa, synthetic construct
DIVLTQTPLSSPVTLGQPASISCSVSSSVSYMHWYQQRPGQPPKLLIYDTSKLASGVPDRFSGSGAGTDYTLKISRVEAEDVGVYYCQQWSSNPQYTFGQGTKLEIK

SEQ ID NO: 3224 - protein, 107 aa, synthetic construct
EITLTQSPAFMSATPGDKVNISCSVSSSVSYMHWYQQKPGEAPKFIIYDTSKLASGIPPRFSGSGYGTDYTLTINNIESEDAAYYYCQQWSSNPQYTFGQGTKLEIK

SEQ ID NO: 3225 - protein, 117 aa, synthetic construct
EVQLVESGGGLVKPGGSLRLSCAVSGFTFRSYGMSWVRQAPGKGLEWVALISSGGSYTYYTDSVKGRFTISRDNSKNTLYLQMNSLKTEDTAVYYCSRHGGNFFDYWGQGTTVTVSS

SEQ ID NO: 3226 - protein, 117 aa, synthetic construct
EVQLVESGGALVKPGGSLRLSCAVSGFTFRSYGMSWVRQAPGKGLEWVALISSGGSYTYYTDSVKGRFTISRDNSKNTLYLQMNSLKTEDTAVYYCSRHGGNFFDYWGQGTTVTVSS

SEQ ID NO: 3227 - protein, 117 aa, synthetic construct
EVQLVESGGGLVQPGGSLRLSCAVSGFTFRSYGMSWVRQAPGKGLEWVALISSGGSYTYYTDSVKGRFTISRDNAKNTLYLQMNSLRAEDTAVYYCSRHGGNFFDYWGQGTTVTVSS

SEQ ID NO: 3228 - protein, 117 aa, synthetic construct
EVQLVESGGGLVQPGGSLRLSCAVSGFTFRSYGMSWVRQAPGKGLEWVALISSGGSYTYYTDSVKGRFTISRDNAKNSLYLQMNSLRAEDTAVYYCSRHGGNFFDYWGQGTTVTVSS

SEQ ID NO: 3229 - protein, 117 aa, synthetic construct
EVQLVESGGGLVQPGGSLRLSCAVSGFTFRSYGMSWVRQAPGKGLEWVALISSGGSYTYYTDSVKGRFTISRDNSKNSLYLQMNSLKTEDTAVYYCSRHGGNFFDYWGQGTTVTVSS

SEQ ID NO: 3230 - protein, 117 aa, synthetic construct
EVQLVESGGGLVQPGGSLRLSCAVSGFTFRSYGMSWVRQAPGKGLEWVALISSGGSYTYYTDSVKGRFTISRDNAKNSLYLQMNSLRAEDMAVYYCSRHGGNFFDYWGQGTTVTVSS

SEQ ID NO: 3231 - protein, 117 aa, synthetic construct
EVQLVESGGGLVQPGGSLRLSCAVSGFTFRSYGMSWVRQAPGKGLEWVALISSGGSYTYYTDSVKGQFTISRDNAKNTLYLQMNSLRAEDMAVYYCSRHGGNFFDYWGQGTTVTVSS

SEQ ID NO: 3232 - protein, 117 aa, synthetic construct
EVQLVESGGGLVKPGRSLRLSCTVSGFTFRSYGMSWVRQAPGKGLEWVALISSGGSYTYYTDSVKGRFTISRDNSKNILYLQMNSLKTEDTAVYYCSRHGGNFFDYWGQGTTVTVSS

SEQ ID NO: 3233 - protein, 117 aa, synthetic construct
EVQLVESGGGLVKPGGSLRLSCAVSGFTFRSYGMSWVRQAPGKGLEWVALISSGGSYTYYTDSVKGRFTISRDNAKNSLYLQMNSLRAEDTAVYYCSRHGGNFFDYWGQGTTVTVSS

SEQ ID NO: 3234 - protein, 117 aa, synthetic construct
EVQLVESGGGLVQPGGSLKLSCAVSGFTFRSYGMSWVRQASGKGLEWVALISSGGSYTYYTDSVKGRFTISRDNSKNTLYLQMNSLKTEDTAVYYCSRHGGNFFDYWGQGTTVTVSS

SEQ ID NO: 3235 - protein, 117 aa, synthetic construct
QVQLVESGGGVVQPGGSLRLSCAVSGFTFRSYGMSWVRQAPGKGLEWVALISSGGSYTYYTDSVKGRFTISRDNSKNTLYLQMNSLRAEDTAVYYCSRHGGNFFDYWGQGTTVTVSS

SEQ ID NO: 3236 - protein, 117 aa, synthetic construct
QVQLVESGGGVVQPGRSLRLSCAVSGFTFRSYGMSWVRQAPGKGLEWVALISSGGSYTYYTDSVKGRFTISRDNSKNTLYLQMSSLRAEDTAVYYCSRHGGNFFDYWGQGTTVTVSS

SEQ ID NO: 3237 - protein, 117 aa, synthetic construct
EVQLVESGGGLVQPGGSLRLSCPVSGFTFRSYGMSWVRQAPGKGLEWVALISSGGSYTYYTDSVKGRFTISRDNANNSLYLQMNSLRAEDTAVYYCSRHGGNFFDYWGQGTTVTVSS

SEQ ID NO: 3238 - protein, 117 aa, synthetic construct
EVQLVESGGGLVQPGRSLRLSCTVSGFTFRSYGMSWVRQAPGKGLEWVALISSGGSYTYYTDSVKGRFTISRDNSKNILYLQMNSLKTEDTAVYYCSRHGGNFFDYWGQGTTVTVSS

SEQ ID NO: 3239 - protein, 117 aa, synthetic construct
EVQLVESGGGLVQPGPSLRLSCTVSGFTFRSYGMSWVRQAPGKGLEWVALISSGGSYTYYTDSVKGRFTISRDNSKNILYLQMNSLKTEDTAVYYCSRHGGNFFDYWGQGTTVTVSS

SEQ ID NO: 3240 - protein, 117 aa, synthetic construct
EVQLVESGGGLVQPGGSLRLSCAVSGFTFRSYGMSWVRQAPGKGLEWVALISSGGSYTYYTDSVKGRFTISRDNSKNTLYLQMNSLRAEDTAVYYCSRHGGNFFDYWGQGTTVTVSS

SEQ ID NO: 3241 - protein, 117 aa, synthetic construct
EVQLVESGGGLVQPGGSLRLSCAVSGFTFRSYGMSWVRQAPGKGLEWVALISSGGSYTYYTDSVKGRFTISRDNAKNSLYLQMNSLRDEDTAVYYCSRHGGNFFDYWGQGTTVTVSS

SEQ ID NO: 3242 - protein, 117 aa, synthetic construct
QVQLVESGGGLVKPGGSLRLSCAVSGFTFRSYGMSWVRQAPGKGLEWVALISSGGSYTYYTDSVKGRFTISRDNAKNSLYLQMNSLRAEDTAVYYCSRHGGNFFDYWGQGTTVTVSS

SEQ ID NO: 3243 - protein, 117 aa, synthetic construct
QVQLVESGGGVVQPGRSLRLSCAVSGFTFRSYGMSWVRQAPGKGLEWVALISSGGSYTYYTDSVKGRFTISRDNSKNTLYLQMNSLRAEDTAVYYCSRHGGNFFDYWGQGTTVTVSS

SEQ ID NO: 3244 - protein, 117 aa, synthetic construct
EVQLLESGGGLVQPGGSLRLSCAVSGFTFRSYGMSWVRQAPGKGLEWVALISSGGSYTYYTDSVKGRFTISRDNSKNTLYLQMNSLRAEDTAVYYCSRHGGNFFDYWGQGTTVTVSS

SEQ ID NO: 3245 - protein, 117 aa, synthetic construct
EVQLVESGGGLVQPGGSLRLSCAVSGFTFRSYGMSWVRQAPGKGLEWVALISSGGSYTYYTDSVKGRFTISRHNSKNTLYLQMNSLRAEDTAVYYCSRHGGNFFDYWGQGTTVTVSS

SEQ ID NO: 3246 - protein, 117 aa, synthetic construct
EVQLVESGGGLIQPGGSLRLSCAVSGFTFRSYGMSWVRQPPGKGLEWVALISSGGSYTYYTDSVKGRFTISRDNSKNTLYLQMNSLRAEDTAVYYCSRHGGNFFDYWGQGTTVTVSS

SEQ ID NO: 3247 - protein, 117 aa, synthetic construct
EVQLVESGGGLIQPGGSLRLSCAVSGFTFRSYGMSWVRQAPGKGLEWVALISSGGSYTYYTDSVKGRFTISRDNSKNTLYLQMNSLRAEDTAVYYCSRHGGNFFDYWGQGTTVTVSS

SEQ ID NO: 3248 - protein, 117 aa, synthetic construct
EVQLVESGGGLVQPGRSLRLSCAVSGFTFRSYGMSWVRQAPGKGLEWVALISSGGSYTYYTDSVKGRFTISRDNAKNSLYLQMNSLRAEDTALYYCSRHGGNFFDYWGQGTTVTVSS

SEQ ID NO: 3249 - protein, 117 aa, synthetic construct
QVQLVESGGGVVQPGRSLRLSCAVSGFTFRSYGMSWVRQAPGKGLEWVALISSGGSYTYYTDSVKGRFTISRDNSKNRLYLQMNSLRAEDTAVYYCSRHGGNFFDYWGQGTTVTVSS

SEQ ID NO: 3250 - protein, 117 aa, synthetic construct
QVQLVESGGGVVQPGRSLRLSCAVSGFTFRSYGMSWVRQAPGKGLEWVALISSGGSYTYYTDSVKGRFTISRDNSKNTLYLQMNSLRAEGTAVYYCSRHGGNFFDYWGQGTTVTVSS

SEQ ID NO: 3251 - protein, 117 aa, synthetic construct
QVQLVESGGGVVQPGRSLRLSCAVSGFTFRSYGMSWVRQAPGKGLEWVALISSGGSYTYYTDSVKGRFAISRDNSKNTLYLQMNSLRAEDTAVYYCSRHGGNFFDYWGQGTTVTVSS

SEQ ID NO: 3252 - protein, 117 aa, synthetic construct
QVQLVDSGGGVVQPGRSLRLSCAVSGFTFRSYGMSWVRQAPGKGLEWVALISSGGSYTYYTDSVKGRFTISRDNSKNTLYLQMNSLRAEDTAVYYCSRHGGNFFDYWGQGTTVTVSS

SEQ ID NO: 3253 - protein, 117 aa, synthetic construct
EVQLVESGGGVVRPGGSLRLSCAVSGFTFRSYGMSWVRQAPGKGLEWVALISSGGSYTYYTDSVKGRFTISRDNAKNSLYLQMNSLRAEDTALYHCSRHGGNFFDYWGQGTTVTVSS

SEQ ID NO: 3254 - protein, 117 aa, synthetic construct
EVQLVESGGVVVQPGGSLRLSCAVSGFTFRSYGMSWVRQAPGKGLEWVALISSGGSYTYYTDSVKGRFTISRDNSKNSLYLQMNSLRAEDTALYYCSRHGGNFFDYWGQGTTVTVSS

SEQ ID NO: 3255 - protein, 117 aa, synthetic construct
EVQLVESGGGVVQPGGSLRLSCAVSGFTFRSYGMSWVRQAPGKGLEWVALISSGGSYTYYTDSVKGRFTISRDNSKNSLYLQMNSLRTEDTALYYCSRHGGNFFDYWGQGTTVTVSS

SEQ ID NO: 3256 - protein, 117 aa, synthetic construct
EVQLVESGGVVVQPGGSLRLSCAVSGFTFRSYGMSWVRQAPGKGLEWVALISSGGSYTYYTDSVKGRFTISRDNSKNSLYLQMNSLRTEDTALYYCSRHGGNFFDYWGQGTTVTVSS

SEQ ID NO: 3257 - protein, 117 aa, synthetic construct
EVQLVETGGGLIQPGGSLRLSCAVSGFTFRSYGMSWVRQAPGKGLEWVALISSGGSYTYYTDSVKGRFTISRDNSKNTLYLQMNSLRAEDTAVYYCSRHGGNFFDYWGQGTTVTVSS

SEQ ID NO: 3258 - protein, 117 aa, synthetic construct
EVQLVESGGGLVQPGGSLRLSCAVSGFTFRSYGMSWVRQATGKGLEWVALISSGGSYTYYTDSVKGRFTISRENAKNSLYLQMNSLRAGDTAVYYCSRHGGNFFDYWGQGTTVTVSS

SEQ ID NO: 3259 - protein, 117 aa, synthetic construct
EVQLVESRGVLVQPGGSLRLSCAVSGFTFRSYGMSWVRQAPGKGLEWVALISSGGSYTYYTDSVKGRFTISRDNSKNTLHLQMNSLRAEDTAVYYCSRHGGNFFDYWGQGTTVTVSS

SEQ ID NO: 3260 - protein, 117 aa, synthetic construct
EVQLVESGGGLVQPGRSLRLSCAVSGFTFRSYGMSWVRQAPGKGLEWVALISSGGSYTYYTDSVKGRFTISRDNAKNSLYLQMNSLRAEDMALYYCSRHGGNFFDYWGQGTTVTVSS

SEQ ID NO: 3261 - protein, 117 aa, synthetic construct
QVQLVESGGGLVQPGGSLRLSCSVSGFTFRSYGMSWVRQAPGKGLEWVALISSGGSYTYYTDSVKGRFTISRDNSKNTLYLQMNSLRAEDTAVYYCSRHGGNFFDYWGQGTTVTVSS

SEQ ID NO: 3262 - protein, 117 aa, synthetic construct
EVQLVESGGGLVQPGGSLRLSCSVSGFTFRSYGMSWVRQAPGKGLEWVALISSGGSYTYYTDSVKGRFTISRDNSKNTLYLQMSSLRAEDTAVYYCSRHGGNFFDYWGQGTTVTVSS

SEQ ID NO: 3263 - protein, 117 aa, synthetic construct
QVQLVESGGGVVQPGRSLRLSCAVSGFTFRSYGMSWVRQAPGKGLEWVALISSGGSYTYYTDSVKGRFTISRDNSTNTLFLQMNSLRAEDTAVYYCSRHGGNFFDYWGQGTTVTVSS

SEQ ID NO: 3264 - protein, 117 aa, synthetic construct
QVQLLESGGGLVKPGGSLRLSCAVSGFTFRSYGMSWVRQAPGKGLEWVALISSGGSYTYYTDSVKGRFTISRDNAKNSLYLQMNSLRAEDTAVYYCSRHGGNFFDYWGQGTTVTVSS

SEQ ID NO: 3265 - protein, 117 aa, synthetic construct
EVQLVESGEGLVQPGGSLRLSCAVSGFTFRSYGMSWVRQAPGKGLEWVALISSGGSYTYYTDSVKGRFTISRDNSKNTLYLQMGSLRAEDMAVYYCSRHGGNFFDYWGQGTTVTVSS

SEQ ID NO: 3266 - protein, 117 aa, synthetic construct
EVQLVESGGGLVQPGGSLRLSCAVSGFTFRSYGMSWVRQAPGKGLEWVALISSGGSYTYYTDSVKGRFTISRDNSKNTLYLQMGSLRAEDMAVYYCSRHGGNFFDYWGQGTTVTVSS

SEQ ID NO: 3267 - protein, 117 aa, synthetic construct
EVQLVESGGGLVQPGGSLRLSCSVSGFTFRSYGMSWVRQAPGKGLEWVALISSGGSYTYYTDSVKGRFTISRDNSKNTLYVQMSSLRAEDTAVYYCSRHGGNFFDYWGQGTTVTVSS

SEQ ID NO: 3268 - protein, 117 aa, synthetic construct
EVQLVESGGGLVQPGGSLRLSCAVSGFTFRSYGMSWVRQAPGKGLEWVALISSGGSYTYYTDSVKGRFIISRDNSRNSLYLQKNRRRAEDMAVYYCSRHGGNFFDYWGQGTTVTVSS

SEQ ID NO: 3269 - protein, 117 aa, synthetic construct
EVQLVESGGGLVQPGGSLRLSCAVSGFTFRSYGMSWVHQAPGKGLEWVALISSGGSYTYYTDSVKGRFIISRDNSRNTLYLQTNSLRAEDTAVYYCSRHGGNFFDYWGQGTTVTVSS

SEQ ID NO: 3270 - protein, 117 aa, synthetic construct
EVHLVESGGGLVQPGGALRLSCAVSGFTFRSYGMSWVRQATGKGLEWVALISSGGSYTYYTDSVKGRFTISRENAKNSLYLQMNSLRAGDTAVYYCSRHGGNFFDYWGQGTTVTVSS

SEQ ID NO: 3271 - protein, 117 aa, synthetic construct
EVQLVESGGGLVQPRGSLRLSCAVSGFTFRSYGMSWVRQAPGKGLEWVALISSGGSYTYYTDSVKGRFTISRDNSKNTLYLQMNNLRAEGTAVYYCSRHGGNFFDYWGQGTTVTVSS

SEQ ID NO: 3272 - protein, 117 aa, synthetic construct
EVQLVESGGGLVQPRGSLRLSCAVSGFTFRSYGMSWVRQAPGKGLEWVALISSGGSYTYYTDSVKGRFTISRDNSKNTLYLQMNNLRAEGTAAYYCSRHGGNFFDYWGQGTTVTVSS

SEQ ID NO: 3273 - protein, 117 aa, synthetic construct
QVQLVQSGAEVKKPGASVKVSCKVSGFTFRSYGMSWVRQAPGKGLEWVALISSGGSYTYYTDSVKGRFTITRDNSTNTLYMELSSLRSEDTAVYYCSRHGGNFFDYWGQGTTVTVSS

SEQ ID NO: 3274 - protein, 117 aa, synthetic construct
QVQLVQSGSELKKPGASVKVSCKVSGFTFRSYGMSWVRQAPGQGLEWVALISSGGSYTYYTDSVKGRFVISRDNSVNTLYLQISSLKAEDTAVYYCSRHGGNFFDYWGQGTTVTVSS

SEQ ID NO: 3275 - protein, 470 aa, synthetic construct
METDTLLLWVLLLWVPGSTGQVQLVESGGGVVQPGRSLRLSCAASGIDFSRYWMSWVRQAPGKGLEWVGEINPDSSTINYAPSLKDRFTISRDNSKNTLYLQMSSLRAEDTAVYYCASLYYDYGDAMDYWGQGTTVTVSSASTKGPSVFPLAPSSKSTSGGTAALGCLVKDYFPEPVTVSWNSGALTSGVHTFPAVLQSSGLYSLSSVVTVPSSSLGTQTYICNVNHKPSNTKVDKRVEPKSCDKTHTCPPCPAPELLGGPSVFLFPPKPKDTLMISRTPEVTCVVVDVSHEDPEVKFNWYVDGVEVHNAKTKPREEQYNATYRVVSVLTVLHQDWLNGKEYKCKVSNKALPAPIEKTISKAKGQPREPQVYTLPPCREEMTKNQVSLWCLVKGFYPSDIAVEWESNGQPENNYKTTPPVLDSDGSFFLYSKLTVDKSRWQQGNVFSCSVMHEALHNHYTQKSLSLSPGK

SEQ ID NO: 3276 - protein, 503 aa, synthetic construct
METDTLLLWVLLLWVPGSTGQVQLVQSGAEVKKPGSSVKVSCKASGYSFTTYYIHWVRQAPGQGLEWMGWFFPGSGNIKYNEKFKGRVTITADTSTSTAYMELSSLRSEDTAVYYCAGSYYSYDVLDYWGQGTTVTVSSGGGGSGGGGSGGGGSGGGGSDIQMTQSPSFLSASVGDRVTITCKASQNVGINVVWHQQKPGKAPKALIYSSSHRYSGVPSRFSGSGSGTEFTLTISSLQPEDFATYFCQQFKSYPLTFGQGTKLEIKGGGGSGGGGSDKTHTCPPCPAPELLGGPSVFLFPPKPKDTLMISRTPEVTCVVVDVSHEDPEVKFNWYVDGVEVHNAKTKPREEQYASTYRVVSVLTVLHQDWLNGKEYKCKVSNKALPAPIEKTISKAKGQPREPQVCTLPPSREEMTKNQVSLSCAVKGFYPSDIAVEWESNGQPENNYKTTPPVLDSDGSFFLVSKLTVDKSRWQQGNVFSCSVMHEALHNHYTQKSLSLSPGK

SEQ ID NO: 3277 - protein, 234 aa, synthetic construct; identical to SEQ ID NO: 1007

SEQ ID NO: 3278 - protein, 469 aa, synthetic construct
METDTLLLWVLLLWVPGSTGQVQLVQSGAEVKKPGSSVKVSCKASGYSFTTYYIHWVRQAPGQGLEWMGWFFPGSGNIKYNEKFKGRVTITADTSTSTAYMELSSLRSEDTAVYYCAGSYYSYDVLDYWGQGTTVTVSSASTKGPSVFPLAPSSKSTSGGTAALGCLVKDYFPEPVTVSWNSGALTSGVHTFPAVLQSSGLYSLSSVVTVPSSSLGTQTYICNVNHKPSNTKVDKRVEPKSCDKTHTCPPCPAPELLGGPSVFLFPPKPKDTLMISRTPEVTCVVVDVSHEDPEVKFNWYVDGVEVHNAKTKPREEQYNSTYRVVSVLTVLHQDWLNGKEYKCKVSNKALPAPIEKTISKAKGQPREPQVYTLPPSREEMTKNQVSLTCLVKGFYPSDIAVEWESNGQPENNYKTTPPVLDSDGSFFLYSKLTVDKSRWQQGNVFSCSVMHEALHNHYTQKSLSLSPGK

SEQ ID NO: 3279 - protein, 234 aa, synthetic construct
METDTLLLWVLLLWVPGSTGDIQMTQSPSSLSASVGDRVTITCKASQNVGINVVWHQQKPGKVPKALIYSSSHRYSGVPSRFSGSGSGTDFTLTISSLQPEDVATYFCQQFKSYPLTFGQGTKLEIKRTVAAPSVFIFPPSDEQLKSGTASVVCLLNNFYPREAKVQWKVDNALQSGNSQESVTEQDSKDSTYSLSSTLTLSKADYEKHKVYACEVTHQGLSSPVTKSFNRGEC

SEQ ID NO: 3280 - protein, 247 aa, synthetic construct
METDTLLLWVLLLWVPGSTGDKTHTCPPCPAPELLGGPSVFLFPPKPKDTLMISRTPEVTCVVVDVSHEDPEVKFNWYVDGVEVHNAKTKPREEQYNSTYRVVSVLTVLHQDWLNGKEYKCKVSNKALPAPIEKTISKAKGQPREPQVYTLPPCREEMTKNQVSLWCLVKGFYPSDIAVEWESNGQPENNYKTTPPVLDSDGSFFLYSKLTVDKSRWQQGNVFSCSVMHEALHNRFTQKSLSLSPGK

SEQ ID NO: 3281 - protein, 520 aa, synthetic construct
METDTLLLWVLLLWVPGSTGEVQLVESGGGLVQPGGSLRLSCAASGFTFSNFGMHWVRQAPGKGLEWVSYISSGSSTIYYADTLKGRFTISRDNSKNTLYLQMNSLRAEDTAVYYCARRGEGAMDYWGQGTTVTVSSGGGGSGGGGSGGGGSGGGGSDNQLTQSPSFLSASVGDRVTITCRASSSVNYIYWYQQKPGKAPKLLIYYTSNLAPGVPSRFSGSGSGNEYTLTISSLQPEDFATYYCQQFTSSPFTFGQGTKLEIKGGGGSDKTHTCPPCPAPELLGGPSVFLFPPKPKDTLMISRTPEVTCVVVDVSHEDPEVKFNWYVDGVEVHNAKTKPREEQYNSTYRVVSVLTVLHQDWLNGKEYKCKVSNKALPAPIEKTISKAKGQPREPQVCTLPPSREEMTKNQVSLSCAVKGFYPSDIAVEWESNGQPENNYKTTPPVLDSDGSFFLVSKLTVDKSRWQQGNVFSCSVMHEALHNHYTQKSLSLSPGKGGGGSGGGGSGLNDIFEAQKIEWHE

SEQ ID NO: 3282 - protein, 284 aa, synthetic construct
METDTLLLWVLLLWVPGSTGGLNDIFEAQKIEWHEGGGGSEPRTDTDTCPNPPDPCPTCPTPDLLGGPSVFIFPPKPKDVLMISLTPKITCVVVDVSEEEPDVQFNWYVNNVEDKTAQTETRQRQYNSTYRVVSVLPIKHQDWMSGKVFKCKVNNNALPSPIEKTISKPRGQVRVPQIYTFPPPIEQTVKKDVSVTCLVTGFLPQDIHVEWESNGQPQPEQNYKNTQPVLDSDGSYFLYSKLNVPKSRWDQGDSFTCSVIHEALHNHHMTKTISRSLGNGGGGS

SEQ ID NO: 3283 - protein, 272 aa, synthetic construct
METDTLLLWVLLLWVPGSTGDKTHTCPPCPAPELLGGPSVFLFPPKPKDTLMISRTPEVTCVVVDVSHEDPEVKFNWYVDGVEVHNAKTKPREEQYNSTYRVVSVLTVLHQDWLNGKEYKCKVSNKALPAPIEKTISKAKGQPREPQVYTLPPSREEMTKNQVSLTCLVKGFYPSDIAVEWESNGQPENNYKTTPPVLDSDGSFFLYSKLTVDKSRWQQGNVFSCSVMHEALHNHYTQKSLSLSPGKGGGGSGGGGSGLNDIFEAQKIEWHE

SEQ ID NO: 3284 - protein, 469 aa, synthetic construct
METDTLLLWVLLLWVPGSTGQVQLQQSGPELVKPGASVKISCKASGYAFSSSWMNWVKQRPGQGLEWIGRIYPGDGDTKYNGKFKGKATLTADKSSSTAYMHLSSLTSVDSAVYFCARRGTGGWYFDVWGAGTTVTVSSAKTTAPSVYPLAPVCGDTTGSSVTLGCLVKGYFPEPVTLTWNSGSLSSGVHTFPAVLQSDLYTLSSSVTVTSSTWPSQSITCNVAHPASSTKVDKKIEPRGPTIKPCPPCKCPAPNLLGGPSVFIFPPKIKDVLMISLSPIVTCVVVDVSEDDPDVQISWFVNNVEVHTAQTQTHREDYNSTLRVVSALPIQHQDWMSGKEFKCKVNNKDLPAPIERTISKPKGSVRAPQVYVLPPPEEEMTKKQVTLTCMVTDFMPEDIYVEWTNNGKTELNYKNTEPVLDSDGSYFMYSKLRVEKKNWVERNSYSCSVVHEGLHNHHTTKSFSRTPGK

SEQ ID NO: 3285 - protein, 238 aa, synthetic construct
METDTLLLWVLLLWVPGSTGDIVLTQSPASLAVSLGQRATISCRASESVDSSGNSFMHWYQQKPGQPPQLLIYRASNLESGIPARFSGSGSRTDFTLTINPVEADDVATFYCQQSFDDPFTFGSGTKLEIKRADAAPTVSIFPPSSEQLTSGGASVVCFLNNFYPKDINVKWKIDGSERQNGVLNSWTDQDSKDSTYSMSSTLTLTKDEYERHNSYTCEATHKTSTSPIVKSFNRNEC

SEQ ID NO: 3286 - protein, 739 aa, synthetic construct
METDTLLLWVLLLWVPGSTGQVQLVESGGGVVQPGRSLRLSCAASGIDFSRYWMSWVRQAPGKGLEWVGEINPDSSTINYAPSLKDRFTISRDNSKNTLYLQMSSLRAEDTAVYYCASLYYDYGDAMDYWGQGTTVTVSSASTKGPSVFPLAPSSKSTSGGTAALGCLVKDYFPEPVTVSWNSGALTSGVHTFPAVLQSSGLYSLSSVVTVPSSSLGTQTYICNVNHKPSNTKVDKRVEPKSCDKTHTCPPCPAPELLGGPSVFLFPPKPKDTLMISRTPEVTCVVVDVSHEDPEVKFNWYVDGVEVHNAKTKPREEQYNSTYRVVSVLTVLHQDWLNGKEYKCKVSNKALPAPIEKTISKAKGQPREPQVYTLPPCREEMTKNQVSLWCLVKGFYPSDIAVEWESNGQPENNYKTTPPVLDSDGSFFLYSKLTVDKSRWQQGNVFSCSVMHEALHNHYTQKSLSLSPGKGGGGSGGGGSGGGGSEVQLVESGGGLVQPGGSLRLSCAASGFTFSTYAMNWVRQAPGKGLEWVSRIRSKYNNYATYYADSVKDRFTISRDDSKNTLYLQMNSLKTEDTAVYYCVRHGNFGNSYVSWFAYWGQGTLVTVSSGGGGSGGGGSGGGGSGGGGSQAVVTQEPSLTVSPGGTVTLTCRSSTGAVTTSNYANWVQQKPGQAPRGLIGGTNKRAPWTPARFSGSLLGGKAALTLSGAQPEDEAEYYCALWYSNLWVFGGGTKLTVL

SEQ ID NO: 3287 - protein, 247 aa, synthetic construct
METDTLLLWVLLLWVPGSTGDKTHTCPPCPAPELLGGPSVFLFPPKPKDTLMISRTPEVTCVVVDVSHEDPEVKFNWYVDGVEVHNAKTKPREEQYNSTYRVVSVLTVLHQDWLNGKEYKCKVSNKALPAPIEKTISKAKGQPREPQVCTLPPSREEMTKNQVSLSCAVKGFYPSDIAVEWESNGQPENNYKTTPPVLDSDGSFFLVSKLTVDKSRWQQGNVFSCSVMHEALHNHYTQKSLSLSPGK

SEQ ID NO: 3288 - protein, 20 aa, synthetic construct
METDTLLLWVLLLWVPGSTG

SEQ ID NO: 3289 - protein, 107 aa, synthetic construct; identical to SEQ ID NO: 230
  VARIANT 30: note = G, E, A or D
  VARIANT 31: note = N or D
  VARIANT 32: note = R or K
  VARIANT 36: note = Y or H
  VARIANT 56: note = K or S

SEQ ID NO: 3290 - protein, 119 aa, synthetic construct; identical to SEQ ID NO: 231
  VARIANT 27: note = H or T or G or Y
  VARIANT 28: note = D or T or S
  VARIANT 30: note = H or R or D or K or T
  VARIANT 31: note = L or D or K or T or N
  VARIANT 32: note = W or F or T or I or Y or G
  VARIANT 50: note = R or W
  VARIANT 51: note = V or I or F
  VARIANT 52: note = F or S or Y
  VARIANT 53: note = A or P
  VARIANT 57: note = N or S
  VARIANT 58: note = T or V or Y or I
  VARIANT 59: note = K or R
  VARIANT 98: note = G or V
  VARIANT 100: note = Y or I
  VARIANT 103: note = Y or A
  VARIANT 104: note = D or G

SEQ ID NO: 3291 - protein, 238 aa, synthetic construct
DLKVEMMAGGTQITPLNDNVTIFCNIFYSQPLNITSMGITWFWKSLTFDKEVKVFEFFGDHQEAFRPGAIVSPWRLKSGDASLRLPGIQLEEAGEYRCEVVVTPLKAQGTVQLEVVASPASRLLLDQVGMKENEDKYMCESSGFYPEAINITWEKQTQKFPHPIEISEDVITGPTIKNMDGTFNVTSCLKLNSSQEDPGTVYQCVVRHASLHTPLRSNFTLTAARHSLSETEKTDNFS

SEQ ID NO: 3292 - protein, 284 aa, synthetic construct
EPHSLRYNLTVLSWDGSVQSGFLTEVHLDGQPFLRCDRQKCRAKPQGQWAEDVLGNKTWDRETRDLTGNGKDLRMTLAHIKDQKEGLHSLQEIRVCEIHEDNSTRSSQHFYYDGELFLSQNLETKEWTMPQSSRAQTLAMNVRNFLKEDAMKTKTHYHAMHADCLQELRRYLKSGVVLRRTVPPMVNVTRSEASEGNITVTCRASGFYPWNITLSWRQDGVSLSHDTQQWGDVLPDGNGTYQTWVATRICQGEEQRFTCYMEHSGNHSTHPVPSGKVLVLQSHW

SEQ ID NO: 3293 - protein, 287 aa, synthetic construct
AEPHSLRYNLMVLSQDESVQSGFLAEGHLDGQPFLRYDRQKRRAKPQGQWAEDVLGAKTWDTETEDLTENGQDLRRTLTHIKDQKGGLHSLQEIRVCEIHEDSSTRGSRHFYYDGELFLSQNLETQESTVPQSSRAQTLAMNVTNFWKEDAMKTKTHYRAMQADCLQKLQRYLKSGVAIRRTVPPMVNVTCSEVSEGNITVTCRASSFYPRNITLTWRQDGVSLSHNTQQWGDVLPDGNGTYQTWVATRIRQGEEQRFTCYMEHSGNHGTHPVPSGKVLVLQSQRTD

SEQ ID NO: 3294 - protein, 191 aa, synthetic construct
GWVDTHCLCYDFIITPKSRPEPQWCEVQGLVDERPFLHYDCVNHKAKAFASLGKKVNVTKTWEEQTETLRDVVDFLKGQLLDIQVENLIPIEPLTLQARMSCEHEAHGHGRGSWQFLFNGQKFLLFDSNNRKWTALHPGAKKMTEKWEKNRDVTMFFQKISLGDCKMWLEEFLMYWEQMLDPTKPPSLAPG

SEQ ID NO: 3295 - protein, 329 aa, synthetic construct
QDVRVQVLPEVRGQLGGTVELPCHLLPPVPGLYISLVTWQRPDAPANHQNVAAFHPKMGPSFPSPKPGSERLSFVSAKQSTGQDTEAELQDATLALHGLTVEDEGNYTCEFATFPKGSVRGMTWLRVIAKPKNQAEAQKVTFSQDPTTVALCISKEGRPPARISWLSSLDWEAKETQVSGTLAGTVTVTSRFTLVPSGRADGVTVTCKVEHESFEEPALIPVTLSVRYPPEVSISGYDDNWYLGRTDATLSCDVRSNPEPTGYDWSTTSGTFPTSAVAQGSQLVIHAVDSLFNTTFVCTVTNAVGMGRAEQVIFVRETPNTAGAGATGG

SEQ ID NO: 3296 - protein, 323 aa, synthetic construct
WPPPGTGDVVVQAPTQVPGFLGDSVTLPCYLQVPNMEVTHVSQLTWARHGESGSMAVFHQTQGPSYSESKRLEFVAARLGAELRNASLRMFGLRVEDEGNYTCLFVTFPQGSRSVDIWLRVLAKPQNTAEVQKVQLTGEPVPMARCVSTGGRPPAQITWHSDLGGMPNTSQVPGFLSGTVTVTSLWILVPSSQVDGKNVTCKVEHESFEKPQLLTVNLTVYYPPEVSISGYDNNWYLGQNEATLTCDARSNPEPTGYNWSTTMGPLPPFAVAQGAQLLIRPVDKPINTTLICNVTNALGARQAELTVQVKEGPPSEHSGISRN

SEQ ID NO: 3297 - protein, 330 aa, synthetic construct
QNLFTKDVTVIEGEVATISCQVNKSDDSVIQLLNPNRQTIYFRDFRPLKDSRFQLLNFSSSELKVSLTNVSISDEGRYFCQLYTDPPQESYTTITVLVPPRNLMIDIQKDTAVEGEEIEVNCTAMASKPATTIRWFKGNTELKGKSEVEEWSDMYTVTSQLMLKVHKEDDGVPVICQVEHPAVTGNLQTQRYLEVQYKPQVHIQMTYPLQGLTREGDALELTCEAIGKPQPVMVTWVRVDDEMPQHAVLSGPNLFINNLNKTDNGTYRCEASNIVGKAHSDYMLYVYDPPTTIPPPTTTTTTTTTTTTTILTIITDSRAGEEGSIRAVDH

SEQ ID NO: 3298 - protein, 155 aa, synthetic construct
QRFAQAQQQLPLESLGWDVAELQLNHTGPQQDPRLYWQGGPALGRSFLHGPELDKGQLRIHRDGIYMVHIQVTLAICSSTTASRHHPTTLAVGICSPASRSISLLRLSFHQGCTIASQRLTPLARGDTLCTNLTGTLLPSRNTDETFFGVQWVRP

SEQ ID NO: 3299 - protein, 294 aa, synthetic construct
WTYHYSEKPMNWQRARRFCRDNYTDLVAIQNKAEIEYLEKTLPFSRSYYWIGIRKIGGIWTWVGTNKSLTEEAENWGDGEPNNKKNKEDCVEIYIKRNKDAGKWNDDACHKLKAALCYTASCQPWSCSGHGECVEIINNYTCNCDVGYYGPQCQFVIQCEPLEAPELGTMDCTHPLGNFSFSSQCAFSCSEGTNLTGIEETTCGPFGNWSSPEPTCQVIQCEPLSAPDLGIMNCSHPLASFSFTSACTFICSEGTELIGKKKTICESSGIWSNPSPICQKLDKSFSMIKEGDYN

SEQ ID NO: 3300 - protein, 243 aa, synthetic construct
RYLQVSQQLQQTNRVLEVTNSSLRQQLRLKITQLGQSAEDLQGSRRELAQSQEALQVEQRAHQAAEGQLQACQADRQKTKETLQSEEQQRRALEQKLSNMENRLKPFFTCGSADTCCPSGWIMHQKSCFYISLTSKNWQESQKQCETLSSKLATFSEIYPQSHSYYFLNSLLPNGGSGNSYWTGLSSNKDWKLTDDTQRTRTYAQSSKCNKVHKTWSWWTLESESCRSSLPYICEMTAFRFPD

SEQ ID NO: 3301 - protein, 124 aa, synthetic construct
KLTRDSQSLCPYDWIGFQNKCYYFSKEEGDWNSSKYNCSTQHADLTIIDNIEEMNFLRRYKCSSDHWIGLKMAKNRTGQWVDGATFTKSFGMRGSEGCAYLSDDGAATARCYTERKWICRKRIH

SEQ ID NO: 3302 - protein, 194 aa, synthetic construct
QGHLVHMTVVSGSNVTLNISESLPENYKQLTWFYTFDQKIVEWDSRKSKYFESKFKGRVRLDPQSGALYISKVQKEDNSTYIMRVLKKTGNEQEWKIKLQVLDPVPKPVIKIEKIEDMDDNCYLKLSCVIPGESVNYTWYGDKRPFPKELQNSVLETTLMPHNYSRCYTCQVSNSVSSKNGTVCLSPPCTLARS

SEQ ID NO: 3303 - protein, 133 aa, synthetic construct
QVSHRYPRIQSIKVQFTEYKKEKGFILTSQKEDEIMKVQNNSVIINCDGFYLISLKGYFSQEVNISLHYQKDEEPLFQLKKVRSVNSLMVASLTYKDKVYLNVTTDNTSLDDFHVNGGELILIHQNPGEFCVL

SEQ ID NO: 3304 - protein, 149 aa, synthetic construct
MQKGDQNPQIAAHVISEASSKTTSVLQWAEKGYYTMSNNLVTLENGKQLTVKRQGLYYIYAQVTFCSNREASSQAPFIASLCLKSPGRFERILLRAANTHSSAKPCGQQSIHLGGVFELQPGASVFVNVTDPSQVSHGTGFTSFGLLKL

SEQ ID NO: 3305 - protein, 205 aa, synthetic construct
ACPWAVSGARASPGSAASPRLREGPELSPDDPAGLLDLRQGMFAQLVAQNVLLIDGPLSWYSDPGLAGVSLTGGLSYKEDTKELVVAKAGVYYVFFQLELRRVVAGEGSGSVSLALHLQPLRSAAGAAALALTVDLPPASSEARNSAFGFQGRLLHLSAGQRLGVHLHTEARARHAWQLTQGATVLGLFRVTPEIPAGLPSPRSE

SEQ ID NO: 3306 - protein, 455 aa, unidentified
  source 1..455: note = hyaluronidase sequence
LNFRAPPVIPNVPFLWAWNAPSEFCLGKFDEPLDMSLFSFIGSPRINATGQGVTIFYVDRLGYYPYIDSITGVTVNGGIPQKISLQDHLDKAKKDITFYMPVDNLGMAVIDWEEWRPTWARNWKPKDVYKNRSIELVQQQNVQLSLTEATEKAKQEFEKAGKDFLVETIKLGKLLRPNHLWGYYLFPDCYNHHYKKPGYNGSCFNVEIKRNDDLSWLWNESTALYPSIYLNTQQSPVAATLYVRNRVREAIRVSKIPDAKSPLPVFAYTRIVFTDQVLKFLSQDELVYTFGETVALGASGIVIWGTLSIMRSMKSCLLLDNYMETILNPYIINVTLAAKMCSQVLCQEQGVCIRKNWNSSDYLHLNPDNFAIQLEKGGKFTVRGKPTLEDLEQFSEKFYCSCYSTLSCKEKADVKDTDAVDVCIADGVCIDAFLKPPMETEEPQIFYNASPSTLS

SEQ ID NO: 3307 - protein, 5 aa, synthetic construct
GGGGS

SEQ ID NO: 3308 - protein, 10 aa, synthetic construct
GGGGSGGGGS

SEQ ID NO: 3309 - protein, 15 aa, synthetic construct
GGGGSGGGGSGGGGS

SEQ ID NO: 3310 - protein, 17 aa, synthetic construct
DVPSGPGGGGGSGGGGS

SEQ ID NO: 3311 - protein, 455 aa, synthetic construct; identical to SEQ ID NO: 3306

SEQ ID NO: 3312 - protein, 413 aa, synthetic construct
FRGPLLPNRPFTTVWNANTQWCLERHGVDVDVSVFDVVANPGQTFRGPDMTIFYSSQGTYPYYTPTGEPVFGGLPQNASLIAHLARTFQDILAAIPAPDFSGLAVIDWEAWRPRWAFNWDTKDIYRQRSRALVQAQHPDWPAPQVEAVAQDQFQGAARAWMAGTLQLGRALRPRGLWGFYGFPDCYNYDFLSPNYTGQCPSGIRAQNDQLGWLWGQSRALYPSIYMPAVLEGTGKSQMYVQHRVAEAFRVAVAAGDPNLPVLPYVQIFYDTTNHFLPLDELEHSLGESAAQGAAGVVLWVSWENTRTKESCQAIKEYMDTTLGPFILNVTSGALLCSQALCSGHGRCVRRTSHPKALLLLNPASFSIQLTPGGGPLSLRGALSLEDQAQMAVEFKCRCYPGWQAPWCERKSMW

SEQ ID NO: 3313 - protein, 551 aa, unidentified
  source 1..551: note = collagenase sequence
YNFFPRKPKWDKNQITYRIIGYTPDLDPETVDDAFARAFQVWSDVTPLRFSRIHDGEADIMINFGRWEHGDGYPFDGKDGLLAHAFAPGTGVGGDSHFDDDELWTLGEGQVVRVKYGNADGEYCKFPFLFNGKEYNSCTDTGRSDGFLWCSTTYNFEKDGKYGFCPHEALFTMGGNAEGQPCKFPFRFQGTSYDSCTTEGRTDGYRWCGTTEDYDRDKKYGFCPETAMSTVGGNSEGAPCVFPFTFLGNKYESCTSAGRSDGKMWCATTANYDDDRKWGFCPDQGYSLFLVAAHEFGHAMGLEHSQDPGALMAPIYTYTKNFRLSQDDIKGIQELYGASPDIDLGTGPTPTLGPVTPEICKQDIVFDGIAQIRGEIFFFKDRFIWRTVTPRDKPMGPLLVATFWPELPEKIDAVYEAPQEEKAVFFAGNEYWIYSASTLERGYPKPLTSLGLPPDVQRVDAAFNWSKNKKTYIFAGDKFWRYNEVKKKMDPGFPKLIADAWNAIPDNLDAVVDLQGGGHSYFFKGAYYLKLENQSLKSVKFGSIKSDWLGC

SEQ ID NO: 3314 - protein, 14 aa, synthetic construct
AEAAAKEAAAKAAA

SEQ ID NO: 3315 - protein, 19 aa, synthetic construct
AEAAAKEAAAKEAAAKAAA

SEQ ID NO: 3316 - protein, 24 aa, synthetic construct
AEAAAKEAAAKEAAAKEAAAKAAA

SEQ ID NO: 3317 - protein, 29 aa, synthetic construct
AEAAAKEAAAKEAAAKEAAAKEAAAKAAA

SEQ ID NO: 3318 - protein, 449 aa, synthetic construct
QVQLVQSGAEVKKPGASVKVSCKASGFNIKSAYMHWVRQAPGQEPGCMGRIDPATGKTKYAPKFQARVTMTADTSINTAYTELSSLRSEDTATYYCARSLNWDYGLDYWGQGTLVTVSSASTKGPSVFPLAPSSKSTSGGTAALGCLVKDYFPEPVTVSWNSGALTSGVHTFPAVLQSSGLYSLSSVVTVPSSSLGTQTYICNVNHKPSNTKVDKRVEPKSCDKTHTCPPCPAPELLGGPSVFLFPPKPKDTLMISRTPEVTCVVVDVSHEDPEVKFNWYVDGVEVHNAKTKPREEQYASTYRVVSVLTVLHQDWLNGKEYKCKVSNKALPAPIEKTISKAKGQPREPQVCTLPPSREEMTKNQVSLSCAVKGFYPSDIAVEWESNGQPENNYKTTPPVLDSDGSFFLVSKLTVDKSRWQQGNVFSCSVMHEALHNHYTQKSLSLSPGK

SEQ ID NO: 3319 - protein, 218 aa, synthetic construct
EIVLTQSPATLSLSPGERATLSCRASKSVSILGTHLIHWYQQKPGLAPRLLIYAASNLESGIPDRFSGSGSETDFTLTISRLEPEDFAVYFCQQSIEDPWTFGGGTKVEIKRTVAAPSVFIFPPSDEQLKSGTASVVCLLNNFYPREAKVQWKVDNALQSGNSQESVTEQDSKDSTYSLSSTLTLSKADYEKHKVYACEVTHQGLSSPVTKSFNRGEC

SEQ ID NO: 3320 - skipped

SEQ ID NO: 3321 - protein, 10 aa, synthetic construct
GFNIKSAYMH

SEQ ID NO: 3322 - protein, 17 aa, synthetic construct
RIDPATGKTKYAPKFQA

SEQ ID NO: 3323 - protein, 10 aa, synthetic construct
SLNWDYGLDY

SEQ ID NO: 3324 - protein, 15 aa, synthetic construct
RASKSVSILGTHLIH

SEQ ID NO: 3325 - protein, 7 aa, synthetic construct
AASNLES

SEQ ID NO: 3326 - protein, 9 aa, synthetic construct
QQSIEDPWT

SEQ ID NO: 3327 - skipped

SEQ ID NO: 3328 - protein, 449 aa, synthetic construct
QVQLVQSGAEVKKPGASVKVSCKASGFNIKSAYMHWVRQAPGQGLEWMGRIDPATGKTKYAPKFQARVTMTADTSTNTAYMELSSLRSEDTAVYYCARSLNWDYGLDYWGQGTLVTVSSASTKGPSVFPLAPSSKSTSGGTAALGCLVKDYFPEPVTVSWNSGALTSGVHTFPAVLQSSGLYSLSSVVTVPSSSLGTQTYICNVNHKPSNTKVDKRVEPKSCDKTHTCPPCPAPELLGGPSVFLFPPKPKDTLMISRTPEVTCVVVDVSHEDPEVKFNWYVDGVEVHNAKTKPREEQYASTYRVVSVLTVLHQDWLNGKEYKCKVSNKALPAPIEKTISKAKGQPREPQVCTLPPSREEMTKNQVSLSCAVKGFYPSDIAVEWESNGQPENNYKTTPPVLDSDGSFFLVSKLTVDKSRWQQGNVFSCSVMHEALHNHYTQKSLSLSPGK

SEQ ID NO: 3329 - protein, 218 aa, synthetic construct
EIVLTQSPGTLSLSPGERATLSCRASKSVSILGTHLIHWYQQKPGQAPRLLIYAASNLESGIPDRFSGSGSETDFTLTISRLEPEDFAVYFCQQSIEDPWTFGGGTKVEIKRTVAAPSVFIFPPSDEQLKSGTASVVCLLNNFYPREAKVQWKVDNALQSGNSQESVTEQDSKDSTYSLSSTLTLSKADYEKHKVYACEVTHQGLSSPVTKSFNRGEC

SEQ ID NO: 3330-3337 - skipped (8 entries)

SEQ ID NO: 3338 - protein, 448 aa, synthetic construct
QVQLVQSGAEVKKPGASVKVSCKASGYTFTDYNIHWVRQAPGQGLEWMGYINPYNGRTGYNQKFKARVTMTVDKSTSTAYMELSSLRSEDTAVYYCARWDGSSYFDYWGQGTLVTVSSASTKGPSVFPLAPSSKSTSGGTAALGCLVKDYFPEPVTVSWNSGALTSGVHTFPAVLQSSGLYSLSSVVTVPSSSLGTQTYICNVNHKPSNTKVDKRVEPKSCDKTHTCPPCPAPELLGGPSVFLFPPKPKDTLMISRTPEVTCVVVDVSHEDPEVKFNWYVDGVEVHNAKTKPREEQYASTYRVVSVLTVLHQDWLNGKEYKCKVSNKALPAPIEKTISKAKGQPREPQVCTLPPSREEMTKNQVSLSCAVKGFYPSDIAVEWESNGQPENNYKTTPPVLDSDGSFFLVSKLTVDKSRWQQGNVFSCSVMHEALHNHYTQKSLSLSPGK

SEQ ID NO: 3339 - protein, 213 aa, synthetic construct
EIVLTQSPATLSVSPGERATLSCSASSSVSYMHWYQQKPGQAPRPLIYEISKLASGIPARFSGSGSGTEYTLTISSLQSEDFAVYYCQQWNYPLLTFGQGTKLEIKRTVAAPSVFIFPPSDEQLKSGTASVVCLLNNFYPREAKVQWKVDNALQSGNSQESVTEQDSKDSTYSLSSTLTLSKADYEKHKVYACEVTHQGLSSPVTKSFNRGEC

SEQ ID NO: 3340 - protein, 370 aa, synthetic construct; identical to SEQ ID NO: 241

SEQ ID NO: 3341 - protein, 10 aa, synthetic construct
GYTFTDYNIH

SEQ ID NO: 3342 - protein, 17 aa, synthetic construct
YINPYNGRTGYNQKFKA

SEQ ID NO: 3343 - protein, 9 aa, synthetic construct
WDGSSYFDY

SEQ ID NO: 3344 - protein, 10 aa, synthetic construct
SASSSVSYMH

SEQ ID NO: 3345 - protein, 7 aa, synthetic construct
EISKLAS

SEQ ID NO: 3346 - protein, 9 aa, synthetic construct
QQWNYPLLT

SEQ ID NO: 3347 - skipped

SEQ ID NO: 3348 - protein, 449 aa, synthetic construct; identical to SEQ ID NO: 228

SEQ ID NO: 3349 - protein, 214 aa, synthetic construct; identical to SEQ ID NO: 239

SEQ ID NO: 3350 - protein, 368 aa, synthetic construct
APTSSSTKKTQLQLEHLLLDLQMILNGINNYKNPKLTRMLTFKFYMPKKATELKHLQCLEEELKPLEEVLNLAQSKNFHLRPRDLISNINVIVLELKGSETTFMCEYADETATIVEFLNRWITFAQSIISTLTGGGGSGGGGSDKTHTCPPCPAPELLGGPSVFLFPPKPKDTLMISRTPEVTCVVVDVSHEDPEVKFNWYVDGVEVHNAKTKPREEQYASTYRVVSVLTVLHQDWLNGKEYKCKVSNKALPAPIEKTISKAKGQPREPQVYTLPPCREEMTKNQVSLWCLVKGFYPSDIAVEWESNGQPENNYKTTPPVLDSDGSFFLYSKLTVDKSRWQQGNVFSCSVMHEALHNHYTQKSLSLSP

SEQ ID NO: 3351 - protein, 10 aa, synthetic construct
GHDFRLTYIH

SEQ ID NO: 3352 - protein, 17 aa, synthetic construct
RVSAGSGNVKYNEKFKG

SEQ ID NO: 3353 - protein, 10 aa, synthetic construct
SYYSYDVLDY

SEQ ID NO: 3354 - protein, 11 aa, synthetic construct
KASQNVADRVV

SEQ ID NO: 3355 - protein, 7 aa, synthetic construct
SSSHRYK

SEQ ID NO: 3356 - protein, 9 aa, synthetic construct
QQFKSYPLT

SEQ ID NO: 3357 - skipped

SEQ ID NO: 3358 - protein, 451 aa, synthetic construct
QIQLQQSGPEVVKPGASVQISCKASGYTFSGSWMNWVKQRPGKGLEWIGRIYPGDGDTDYSGKFKGRATLTADKSSSTAYMRLSSLTSEDSAVYFCARSGYFNYVPVFDYWGQGTTLSVSSASTKGPSVFPLAPSSKSTSGGTAALGCLVKDYFPEPVTVSWNSGALTSGVHTFPAVLQSSGLYSLSSVVTVPSSSLGTQTYICNVNHKPSNTKVDKRVEPKSCDKTHTCPPCPAPELLGGPSVFLFPPKPKDTLMISRTPEVTCVVVDVSHEDPEVKFNWYVDGVEVHNAKTKPREEQYASTYRVVSVLTVLHQDWLNGKEYKCKVSNKALPAPIEKTISKAKGQPREPQVCTLPPSREEMTKNQVSLSCAVKGFYPSDIAVEWESNGQPENNYKTTPPVLDSDGSFFLVSKLTVDKSRWQQGNVFSCSVMHEALHNHYTQKSLSLSPGK

SEQ ID NO: 3359 - protein, 212 aa, synthetic construct
QIVLTQSPAIMSASLGEEIALTCSANSTVGYIHWYQQKSGTSPKLLIYTTSNLASGVPSRFSGSGSGTFYSLTISSVEAEDAADYFCHQWSFYPTFGGGTKLEIKRTVAAPSVFIFPPSDEQLKSGTASVVCLLNNFYPREAKVQWKVDNALQSGNSQESVTEQDSKDSTYSLSSTLTLSKADYEKHKVYACEVTHQGLSSPVTKSFNRGEC

SEQ ID NO: 3360-3367 - skipped (8 entries)

SEQ ID NO: 3368 - protein, 450 aa, synthetic construct
NVQLQESGPGLVKPSQSLSLTCSVAGYSITSGYFWNWIRQFPGNKLEWMGYISYDGSNNYNPSLKNRISITRDTSKNQFFLKLNSVTTEDTATYYCASPSPGTGYAVDYWGQGTSVTVSSASTKGPSVFPLAPSSKSTSGGTAALGCLVKDYFPEPVTVSWNSGALTSGVHTFPAVLQSSGLYSLSSVVTVPSSSLGTQTYICNVNHKPSNTKVDKRVEPKSCDKTHTCPPCPAPELLGGPSVFLFPPKPKDTLMISRTPEVTCVVVDVSHEDPEVKFNWYVDGVEVHNAKTKPREEQYASTYRVVSVLTVLHQDWLNGKEYKCKVSNKALPAPIEKTISKAKGQPREPQVCTLPPSREEMTKNQVSLSCAVKGFYPSDIAVEWESNGQPENNYKTTPPVLDSDGSFFLVSKLTVDKSRWQQGNVFSCSVMHEALHNHYTQKSLSLSPGK

SEQ ID NO: 3369 - protein, 219 aa, synthetic construct
NVVMTQTPLSLPVSLGDQASISCRSSQSLVHSNGNTYLHWYLQKPGQSPKFLIYKVSNRFSGVPDRFSGGGSGTEFTLKISRVEAEDLGVYFCSQSTHVPFTFGSGTKLEIKRTVAAPSVFIFPPSDEQLKSGTASVVCLLNNFYPREAKVQWKVDNALQSGNSQESVTEQDSKDSTYSLSSTLTLSKADYEKHKVYACEVTHQGLSSPVTKSFNRGEC

SEQ ID NO: 3370 - skipped

SEQ ID NO: 3371 - protein, 9 aa, synthetic construct
SITSGYFWN

SEQ ID NO: 3372 - protein, 16 aa, synthetic construct
YISYDGSNNYNPSLKN

SEQ ID NO: 3373 - protein, 11 aa, synthetic construct
PSPGTGYAVDY

SEQ ID NO: 3374 - protein, 16 aa, synthetic construct
RSSQSLVHSNGNTYLH

SEQ ID NO: 3375 - protein, 7 aa, synthetic construct
KVSNRFS

SEQ ID NO: 3376 - protein, 9 aa, synthetic construct
SQSTHVPFT

SEQ ID NO: 3377 - skipped

SEQ ID NO: 3378 - protein, 451 aa, synthetic construct
QVQLQQPGAELVRPGASVKLSCKASGYTFTNYWMNWVKQRPGQGLEWIGMIHPSDSATRLNQKFKDKATLTVDKSSSTAYMQLSSPTSEDSAVYYCARWAYYGNLYAIDYWGQGTSVTVSSAKTTAPSVYPLAPVCGDTTGSSVTLGCLVKGYFPEPVTLTWNSGSLSSGVHTFPAVLQSDLYTLSSSVTVTSSTWPSQSITCNVAHPASSTKVDKKIEPRGPTIKPCPPCKCPAPNAAGGPSVFIFPPKIKDVLMISLSPIVTCVVVDVSEDDPDVQISWFVNNVEVHTAQTQTHREDYNSTLRVVSALPIQHQDWMSGKEFKCKVNNKDLGAPIERTISKPKGSVRAPQVCVLPPPEEEMTKKQVTLSCAVTDFMPEDIYVEWTNNGKTELNYKNTEPVLDSDGSYFMVSKLRVEKKNWVERNSYSCSVVHEGLHNHHTTKSFSRTPGK

SEQ ID NO: 3379 - protein, 218 aa, synthetic construct
DIVLTQSPASLAVSLGQRATISCKASQSVDYDGYSYMHWFQQKPGQPPKLLIYAASNLESGIPARFIGSGSGTDFTLNIHPVEEEDAATYYCQQSNEDPWTFGGGTKLEIKRADAAPTVSIFPPSSEQLTSGGASVVCFLNNFYPKDINVKWKIDGSERQNGVLNSWTDQDSKDSTYSMSSTLTLTKDEYERHNSYTCEATHKTSTSPIVKSFNRNEC

SEQ ID NO: 3380 - protein, 371 aa, synthetic construct
APTSSSTKKTQLQLEHLLLDLQMILNGINNYKNPKLTRMLTFKFYMPKKATELKHLQCLEEELKPLEEVLNLAQSKNFHLRPRDLISNINVIVLELKGSETTFMCEYADETATIVEFLNRWITFCQSIISTLTGGGGSGGGGSTIKPCPPCKCPAPNAAGGPSVFIFPPKIKDVLMISLSPIVTCVVVDVSEDDPDVQISWFVNNVEVHTAQTQTHREDYNSTLRVVSALPIQHQDWMSGKEFKCKVNNKDLGAPIERTISKPKGSVRAPQVYVLPPCEEEMTKKQVTLWCMVTDFMPEDIYVEWTNNGKTELNYKNTEPVLDSDGSYFMYSKLRVEKKNWVERNSYSCSVVHEGLHNHHTTKSFSRTPGK

SEQ ID NO: 3381 - protein, 10 aa, synthetic construct
GYTFTNYWMN

SEQ ID NO: 3382 - protein, 17 aa, synthetic construct
MIHPSDSATRLNQKFKD

SEQ ID NO: 3383 - protein, 12 aa, synthetic construct
WAYYGNLYAIDY

SEQ ID NO: 3384 - protein, 15 aa, synthetic construct
KASQSVDYDGYSYMH

SEQ ID NO: 3385 - skipped

SEQ ID NO: 3386 - protein, 9 aa, synthetic construct
QQSNEDPWT

SEQ ID NO: 3387 - skipped

SEQ ID NO: 3388 - protein, 451 aa, synthetic construct
EVQLVESGGGLVQPGASLKLSCVASGFTFSDYWMSWVRQTPGKTMEWIGNIKYDGSHTNYAPSLKNRFTISRDNAKSTLFLQMSNVRSEDTATYYCTRESHYGYIYPFDYWGQGVMVTVSSAKTTAPSVYPLAPVCGDTTGSSVTLGCLVKGYFPEPVTLTWNSGSLSSGVHTFPAVLQSDLYTLSSSVTVTSSTWPSQSITCNVAHPASSTKVDKKIEPRGPTIKPCPPCKCPAPNAAGGPSVFIFPPKIKDVLMISLSPIVTCVVVDVSEDDPDVQISWFVNNVEVHTAQTQTHREDYNSTLRVVSALPIQHQDWMSGKEFKCKVNNKDLGAPIERTISKPKGSVRAPQVCVLPPPEEEMTKKQVTLSCAVTDFMPEDIYVEWTNNGKTELNYKNTEPVLDSDGSYFMVSKLRVEKKNWVERNSYSCSVVHEGLHNHHTTKSFSRTPGK

SEQ ID NO: 3389 - protein, 214 aa, synthetic construct
DIQMTQSPSSMSVSLGDTVTITCRASQDVGIYVNWFQQKPGKSPRRMIYRATNLADGVPSRFSGSRSGSDYSLTISSLESEDVADYHCLQYDESPFTFGSGTKLEIKRADAAPTVSIFPPSSEQLTSGGASVVCFLNNFYPKDINVKWKIDGSERQNGVLNSWTDQDSKDSTYSMSSTLTLTKDEYERHNSYTCEATHKTSTSPIVKSFNRNEC

SEQ ID NO: 3390 - protein, 371 aa, synthetic construct; identical to SEQ ID NO: 3380

SEQ ID NO: 3391 - protein, 10 aa, synthetic construct
GFTFSDYWMS

SEQ ID NO: 3392 - protein, 17 aa, synthetic construct
NIKYDGSHTNYAPSLKN

SEQ ID NO: 3393 - protein, 12 aa, synthetic construct
ESHYGYIYPFDY

SEQ ID NO: 3394 - protein, 11 aa, synthetic construct
RASQDVGIYVN

SEQ ID NO: 3395 - protein, 7 aa, synthetic construct
RATNLAD

SEQ ID NO: 3396 - protein, 9 aa, synthetic construct
LQYDESPFT

SEQ ID NO: 3397 - skipped

SEQ ID NO: 3398 - protein, 452 aa, synthetic construct; identical to SEQ ID NO: 244

SEQ ID NO: 3399 - protein, 220 aa, synthetic construct; identical to SEQ ID NO: 271

SEQ ID NO: 3400 - protein, 383 aa, synthetic construct; identical to SEQ ID NO: 266

SEQ ID NO: 3401 - protein, 10 aa, synthetic construct
GYTFSNYWIE

SEQ ID NO: 3402 - protein, 17 aa, synthetic construct
EILPGAGPTNYNEKFKG

SEQ ID NO: 3403 - protein, 10 aa, synthetic construct
TDYDYDWFAY

SEQ ID NO: 3404 - protein, 17 aa, synthetic construct
KSSQSLLYSGNQKNYLA

SEQ ID NO: 3405 - protein, 7 aa, synthetic construct
WASTRES

SEQ ID NO: 3406 - protein, 9 aa, synthetic construct
QQYYGYPRT

SEQ ID NO: 3407 - skipped

SEQ ID NO: 3408 - protein, 446 aa, synthetic construct
QIQLVQSGPELKKPGETVKISCKASGYTFTDYSMHWMKQAPGKGLKWMAWINTDTGEPTYADDFKGRFAFSLETSVSTAYLQINNLKNEDTATYFCARSSRRFDYWGQGTTLTVSSASTKGPSVFPLAPSSKSTSGGTAALGCLVKDYFPEPVTVSWNSGALTSGVHTFPAVLQSSGLYSLSSVVTVPSSSLGTQTYICNVNHKPSNTKVDKRVEPKSCDKTHTCPPCPAPELLGGPSVFLFPPKPKDTLMISRTPEVTCVVVDVSHEDPEVKFNWYVDGVEVHNAKTKPREEQYASTYRVVSVLTVLHQDWLNGKEYKCKVSNKALPAPIEKTISKAKGQPREPQVCTLPPSREEMTKNQVSLSCAVKGFYPSDIAVEWESNGQPENNYKTTPPVLDSDGSFFLVSKLTVDKSRWQQGNVFSCSVMHEALHNHYTQKSLSLSPGK

SEQ ID NO: 3409 - protein, 214 aa, synthetic construct
NIVMTQSPKSMSMSVGERVTLSCKASENVGTYVSWYQQKPEQSPKLLIYGASNRYTGVPDRFTGSGSAKDFTLTIRSVQAEDLADYHCGQSYISPYTFGGGTKLEIKRTVAAPSVFIFPPSDEQLKSGTASVVCLLNNFYPREAKVQWKVDNALQSGNSQESVTEQDSKDSTYSLSSTLTLSKADYEKHKVYACEVTHQGLSSPVTKSFNRGEC

SEQ ID NO: 3410 - skipped

SEQ ID NO: 3411 - protein, 10 aa, synthetic construct
GYTFTDYSMH

SEQ ID NO: 3412 - protein, 17 aa, synthetic construct
WINTDTGEPTYADDFKG

SEQ ID NO: 3413 - protein, 7 aa, synthetic construct
SSRRFDY

SEQ ID NO: 3414 - protein, 11 aa, synthetic construct
KASENVGTYVS

SEQ ID NO: 3415 - protein, 7 aa, synthetic construct
GASNRYT

SEQ ID NO: 3416 - protein, 9 aa, synthetic construct
GQSYISPYT

SEQ ID NO: 3417-3419 - skipped (3 entries)

SEQ ID NO: 3420 - protein, 449 aa, synthetic construct
ITCPPPMSVEHADIWVKSYSLYSRERYICNSGFKRKAGTSSLTECVLNKATNVAHWTTPSLKCIRDPALVHQRPAPPSGGSGGGGSGGGSGGGGSGGGNWVNVISDLKKIEDLIQSMHIDATLYTESDVHPSCKVTAMKCFLLELQVISLESGDASIHDTVENLIILANNSLSSNGNVTESGCKECEELEEKNIKEFLQSFVHIVQMFINTSGGGGSGGGGSDKTHTCPPCPAPELLGGPSVFLFPPKPKDTLMISRTPEVTCVVVDVSHEDPEVKFNWYVDGVEVHNAKTKPREEQYASTYRVVSVLTVLHQDWLNGKEYKCKVSNKALPAPIEKTISKAKGQPREPQVYTLPPCREEMTKNQVSLWCLVKGFYPSDIAVEWESNGQPENNYKTTPPVLDSDGSFFLYSKLTVDKSRWQQGNVFSCSVMHEALHNHYTQKSLSLSPGK

SEQ ID NO: 3421 - protein, 5 aa, synthetic construct
LTYIH

SEQ ID NO: 3422-3427 - skipped (6 entries)

SEQ ID NO: 3428 - protein, 214 aa, synthetic construct
DIQMTQSPSFLSASVGDRVTITCKASQNVADRVVWHQQKPGKAPKALIYAASYLQSGVPSRFSGSGSGTEFTLTISSLQPEDFATYFCQQFKSYPLTFGQGTKLEIKRTVAAPSVFIFPPSDEQLKSGTASVVCLLNNFYPREAKVQWKVDNALQSGNSQESVTEQDSKDSTYSLSSTLTLSKADYEKHKVYACEVTHQGLSSPVTKSFNRGEC

SEQ ID NO: 3429-3436 - skipped (8 entries)

SEQ ID NO: 3437 - protein, 214 aa, synthetic construct
DIQMTQSPSFLSASVGDRVTITCKASQNVADRVVWHQQKPGKAPKALIFAASYLQSGVPSRFSGSGSGTEFTLTISSLQPEDFATYFCQQFKSYPLTFGQGTKLEIKRTVAAPSVFIFPPSDEQLKSGTASVVCLLNNFYPREAKVQWKVDNALQSGNSQESVTEQDSKDSTYSLSSTLTLSKADYEKHKVYACEVTHQGLSSPVTKSFNRGEC

SEQ ID NO: 3438 - protein, 117 aa, synthetic construct
EVQLVESGGGLVQPGGSLRLSCAASGFTFSNFGMHWVRQAPGKGLEWVSYISSGSSTIYYADTLKGRFTISRDNAKNSLYLQMNSLRAEDTAVYYCARRGEGAMDYWGQGTTVTVSS

SEQ ID NO: 3439 - protein, 116 aa, synthetic construct
EVQLLESGGGLVQPGGSLRLSCAASGFTFSSYAMSWVRQAPGKGLEWVSAISGSGGSTYYADSVKGRFTISRDNSKNTLYLQMNSLRAEDTAVYYCAKVLGWFDYWGQGTLVTVSS

SEQ ID NO: 3440 - protein, 109 aa, synthetic construct
EIVLTQSPGTLSLSPGERATLSCRASQSVSSSYLAWYQQKPGQAPRLLIYGASSRATGIPDRFSGSGSGTDFTLTISRLEPEDFAVYYCQQYGYPPDFTFGQGTKVEIK

SEQ ID NO: 3441 - protein, 119 aa, synthetic construct
EVQLLESGGGLVQPGGSLRLSCAASGFTFSSYAMSWVRQAPGKGLEWVSAISGSGGSTYYADSVKGRFTISRDNSKNTLYLQMNSLRAEDTAVYYCAKVAPYFAPFDYWGQGTLVTVSS

SEQ ID NO: 3442 - protein, 109 aa, synthetic construct
EIVLTQSPGTLSLSPGERATLSCRASQSVSSSYLAWYQQKPGQAPRLLIYGASSRATGIPDRFSGSGSGTDFTLTISRLEPEDFAVYYCQQYGNPPLYTFGQGTKVEIK

SEQ ID NO: 3443 - protein, 7 aa, synthetic construct
AASYLQS

SEQ ID NO: 3444 - protein, 111 aa, synthetic construct
DIVMTQSPLSLPVTPGEPASISCRSSQSLLHSNGYNYLDWYLQKPGQSPQLLIYLGSNRASGVPDRFSGSGSGTDFTLKISRVEAEDVGVYYCMQAMQIPTFGQGTKVEIK

SEQ ID NO: 3445 - protein, 118 aa, synthetic construct
QVQLVQSGAEVKKPGASVKVSCKASGYTFTDYNIHWVRQAPGQGLEWMGYINPYNGRTGYNQKFKARVTMTVDKSTSTAYMELSSLRSEDTAVYYCARWDGSSYFDYWGQGTLVTVSS

SEQ ID NO: 3446 - protein, 106 aa, synthetic construct
EIVLTQSPATLSVSPGERATLSCSASSSVSYMHWYQQKPGQAPRPLIYEISKLASGIPARFSGSGSGTEYTLTISSLQSEDFAVYYCQQWNYPLLTFGQGTKLEIK

SEQ ID NO: 3447 - protein, 227 aa, synthetic construct
DKTHTCPPCPAPELLGGPSVFLFPPKPKDTLMISRTPEVTCVVVDVSHEDPEVKFNWYVDGVEVHNAKTKPREEQYASTYRVVSVLTVLHQDWLNGKEYKCKVSNKALPAPIEKTISKAKGQPREPQVCTLPPSREEMTKNQVSLSCAVKGFYPSDIAVEWESNGQPENNYKTTPPVLDSDGSFFLVSKLTVDKSRWQQGNVFSCSVMHEALHNHYTQKSLSLSPGK

SEQ ID NO: 3448 - protein, 119 aa, synthetic construct
QVQLVQSGAEVKKPGASVKVSCKASGFNIKSAYMHWVRQAPGQEPGCMGRIDPATGKTKYAPKFQARVTMTADTSINTAYTELSSLRSEDTATYYCARSLNWDYGLDYWGQGTLVTVSS

SEQ ID NO: 3449 - protein, 111 aa, synthetic construct
EIVLTQSPATLSLSPGERATLSCRASKSVSILGTHLIHWYQQKPGLAPRLLIYAASNLESGIPDRFSGSGSETDFTLTISRLEPEDFAVYFCQQSIEDPWTFGGGTKVEIK

SEQ ID NO: 3450 - protein, 119 aa, synthetic construct; identical to SEQ ID NO: 1113

SEQ ID NO: 3451 - protein, 111 aa, synthetic construct
EIVLTQSPGTLSLSPGERATLSCRASKSVSILGTHLIHWYQQKPGQAPRLLIYAASNLESGIPDRFSGSGSETDFTLTISRLEPEDFAVYFCQQSIEDPWTFGGGTKVEIK

SEQ ID NO: 3452 - protein, 328 aa, synthetic construct
ASTKGPSVFPLAPSSKSTSGGTAALGCLVKDYFPEPVTVSWNSGALTSGVHTFPAVLQSSGLYSLSSVVTVPSSSLGTQTYICNVNHKPSNTKVDKRVEPKSCDKTHTCPPCPAPELLGGPSVFLFPPKPKDTLMISRTPEVTCVVVDVSHEDPEVKFNWYVDGVEVHNAKTKPREEQYASTYRVVSVLTVLHQDWLNGKEYKCKVSNKALPAPIEKTISKAKGQPREPQVCTLPPSREEMTKNQVSLSCAVKGFYPSDIAVEWESNGQPENNYKTTPPVLDSDGSFFLVSKLTVDKSRWQQGNVFSCSVMHEALHNHYTQKSLSLSP

SEQ ID NO: 3453 - protein, 225 aa, synthetic construct
DKTHTCPPCPAPELLGGPSVFLFPPKPKDTLMISRTPEVTCVVVDVSHEDPEVKFNWYVDGVEVHNAKTKPREEQYASTYRVVSVLTVLHQDWLNGKEYKCKVSNKALPAPIEKTISKAKGQPREPQVCTLPPSREEMTKNQVSLSCAVKGFYPSDIAVEWESNGQPENNYKTTPPVLDSDGSFFLVSKLTVDKSRWQQGNVFSCSVMHEALHNHYTQKSLSLSP

SEQ ID NO: 3454 - protein, 225 aa, synthetic construct
DKTHTCPPCPAPELLGGPSVFLFPPKPKDTLMISRTPEVTCVVVDVSHEDPEVKFNWYVDGVEVHNAKTKPREEQYASTYRVVSVLTVLHQDWLNGKEYKCKVSNKALPAPIEKTISKAKGQPREPQVYTLPPCREEMTKNQVSLWCLVKGFYPSDIAVEWESNGQPENNYKTTPPVLDSDGSFFLYSKLTVDKSRWQQGNVFSCSVMHEALHNHYTQKSLSLSP

SEQ ID NO: 3455 - protein, 120 aa, synthetic construct
NVQLQESGPGLVKPSQSLSLTCSVAGYSITSGYFWNWIRQFPGNKLEWMGYISYDGSNNYNPSLKNRISITRDTSKNQFFLKLNSVTTEDTATYYCASPSPGTGYAVDYWGQGTSVTVSS

SEQ ID NO: 3456 - protein, 112 aa, synthetic construct
NVVMTQTPLSLPVSLGDQASISCRSSQSLVHSNGNTYLHWYLQKPGQSPKFLIYKVSNRFSGVPDRFSGGGSGTEFTLKISRVEAEDLGVYFCSQSTHVPFTFGSGTKLEIK

SEQ ID NO: 3457 - protein, 121 aa, synthetic construct
QVQLQQPGAELVRPGASVKLSCKASGYTFTNYWMNWVKQRPGQGLEWIGMIHPSDSATRLNQKFKDKATLTVDKSSSTAYMQLSSPTSEDSAVYYCARWAYYGNLYAIDYWGQGTSVTVSS

SEQ ID NO: 3458 - protein, 111 aa, synthetic construct
DIVLTQSPASLAVSLGQRATISCKASQSVDYDGYSYMHWFQQKPGQPPKLLIYAASNLESGIPARFIGSGSGTDFTLNIHPVEEEDAATYYCQQSNEDPWTFGGGTKLEIK

SEQ ID NO: 3459 - protein, 330 aa, synthetic construct
AKTTAPSVYPLAPVCGDTTGSSVTLGCLVKGYFPEPVTLTWNSGSLSSGVHTFPAVLQSDLYTLSSSVTVTSSTWPSQSITCNVAHPASSTKVDKKIEPRGPTIKPCPPCKCPAPNAAGGPSVFIFPPKIKDVLMISLSPIVTCVVVDVSEDDPDVQISWFVNNVEVHTAQTQTHREDYNSTLRVVSALPIQHQDWMSGKEFKCKVNNKDLGAPIERTISKPKGSVRAPQVCVLPPPEEEMTKKQVTLSCAVTDFMPEDIYVEWTNNGKTELNYKNTEPVLDSDGSYFMVSKLRVEKKNWVERNSYSCSVVHEGLHNHHTTKSFSRTPGK

SEQ ID NO: 3460 - protein, 228 aa, synthetic construct
TIKPCPPCKCPAPNAAGGPSVFIFPPKIKDVLMISLSPIVTCVVVDVSEDDPDVQISWFVNNVEVHTAQTQTHREDYNSTLRVVSALPIQHQDWMSGKEFKCKVNNKDLGAPIERTISKPKGSVRAPQVCVLPPPEEEMTKKQVTLSCAVTDFMPEDIYVEWTNNGKTELNYKNTEPVLDSDGSYFMVSKLRVEKKNWVERNSYSCSVVHEGLHNHHTTKSFSRTPGK

SEQ ID NO: 3461 - protein, 107 aa, synthetic construct; identical to SEQ ID NO: 256

SEQ ID NO: 3462 - protein, 228 aa, synthetic construct
TIKPCPPCKCPAPNAAGGPSVFIFPPKIKDVLMISLSPIVTCVVVDVSEDDPDVQISWFVNNVEVHTAQTQTHREDYNSTLRVVSALPIQHQDWMSGKEFKCKVNNKDLGAPIERTISKPKGSVRAPQVYVLPPCEEEMTKKQVTLWCMVTDFMPEDIYVEWTNNGKTELNYKNTEPVLDSDGSYFMYSKLRVEKKNWVERNSYSCSVVHEGLHNHHTTKSFSRTPGK

SEQ ID NO: 3463 - protein, 121 aa, synthetic construct
EVQLVESGGGLVQPGASLKLSCVASGFTFSDYWMSWVRQTPGKTMEWIGNIKYDGSHTNYAPSLKNRFTISRDNAKSTLFLQMSNVRSEDTATYYCTRESHYGYIYPFDYWGQGVMVTVSS

SEQ ID NO: 3464 - protein, 107 aa, synthetic construct
DIQMTQSPSSMSVSLGDTVTITCRASQDVGIYVNWFQQKPGKSPRRMIYRATNLADGVPSRFSGSRSGSDYSLTISSLESEDVADYHCLQYDESPFTFGSGTKLEIK

SEQ ID NO: 3465 - protein, 119 aa, synthetic construct
QVQLQQSGTELMKPGASVKISCKASGYTFSNYWIEWIKQRPGHGLEWVGEILPGAGPTNYNEKFKGKATFTADSSSNTAYMQLSSLTSEDSAVYYCARTDYDYDWFAYWGQGTLVTVSA

SEQ ID NO: 3466 - protein, 113 aa, synthetic construct; identical to SEQ ID NO: 252

SEQ ID NO: 3467 - protein, 333 aa, synthetic construct
AKTTAPSVYPLAPVSGDTTGSSVTLGCLVKGYFPEPVTLTWNSGSLSSGVHTFPAVLQSDLYTLSSSVTVTSSTWPSQSITCNVAHPASSTKVDKKIEPKSCDKTHTCPPCPAPNAAGGPSVFIFPPKIKDVLMISLSPIVTCVVVDVSEDDPDVQISWFVNNVEVHTAQTQTHREDYNSTLRVVSALPIQHQDWMSGKEFKCKVNNKDLGAPIERTISKPKGSVRAPQVCVLPPPEEEMTKKQVTLSCAVTDFMPEDIYVEWTNNGKTELNYKNTEPVLDSDGSYFMVSKLRVEKKNWVERNSYSCSVVHEGLHNHHTTKSFSRTPGKEPEA

SEQ ID NO: 3468 - protein, 231 aa, synthetic construct
DKTHTCPPCPAPNAAGGPSVFIFPPKIKDVLMISLSPIVTCVVVDVSEDDPDVQISWFVNNVEVHTAQTQTHREDYNSTLRVVSALPIQHQDWMSGKEFKCKVNNKDLGAPIERTISKPKGSVRAPQVCVLPPPEEEMTKKQVTLSCAVTDFMPEDIYVEWTNNGKTELNYKNTEPVLDSDGSYFMVSKLRVEKKNWVERNSYSCSVVHEGLHNHHTTKSFSRTPGKEPEA

SEQ ID NO: 3469 - protein, 240 aa, synthetic construct
DKTHTCPPCPAPNAAGGPSVFIFPPKIKDVLMISLSPIVTCVVVDVSEDDPDVQISWFVNNVEVHTAQTQTHREDYNSTLRVVSALPIQHQDWMSGKEFKCKVNNKDLGAPIERTISKPKGSVRAPQVYVLPPCEEEMTKKQVTLWCMVTDFMPEDIYVEWTNNGKTELNYKNTEPVLDSDGSYFMYSKLRVEKKNWVERNSYSCSVVHEGLHNHHTTKSFSRTPGKGGGGSHHHHHHHH

SEQ ID NO: 3470 - protein, 116 aa, synthetic construct
QIQLVQSGPELKKPGETVKISCKASGYTFTDYSMHWMKQAPGKGLKWMAWINTDTGEPTYADDFKGRFAFSLETSVSTAYLQINNLKNEDTATYFCARSSRRFDYWGQGTTLTVSS

SEQ ID NO: 3471 - protein, 107 aa, synthetic construct
NIVMTQSPKSMSMSVGERVTLSCKASENVGTYVSWYQQKPEQSPKLLIYGASNRYTGVPDRFTGSGSAKDFTLTIRSVQAEDLADYHCGQSYISPYTFGGGTKLEIK

SEQ ID NO: 3472 - protein, 78 aa, synthetic construct
ITCPPPMSVEHADIWVKSYSLYSRERYICNSGFKRKAGTSSLTECVLNKATNVAHWTTPSLKCIRDPALVHQRPAPPS

SEQ ID NO: 3473 - protein, 20 aa, synthetic construct
GGSGGGGSGGGSGGGGSGGG

SEQ ID NO: 3474 - protein, 212 aa, synthetic construct
ITCPPPMSVEHADIWVKSYSLYSRERYICNSGFKRKAGTSSLTECVLNKATNVAHWTTPSLKCIRDPALVHQRPAPPSGGSGGGGSGGGSGGGGSGGGNWVNVISDLKKIEDLIQSMHIDATLYTESDVHPSCKVTAMKCFLLELQVISLESGDASIHDTVENLIILANNSLSSNGNVTESGCKECEELEEKNIKEFLQSFVHIVQMFINTS

SEQ ID NO: 3475 - protein, 107 aa, synthetic construct
DIQMTQSPSFLSASVGDRVTITCKASQNVADRVVWHQQKPGKAPKALIYAASYLQSGVPSRFSGSGSGTEFTLTISSLQPEDFATYFCQQFKSYPLTFGQGTKLEIK

SEQ ID NO: 3476 - protein, 107 aa, synthetic construct
DIQMTQSPSFLSASVGDRVTITCKASQNVADRVVWHQQKPGKAPKALIFAASYLQSGVPSRFSGSGSGTEFTLTISSLQPEDFATYFCQQFKSYPLTFGQGTKLEIK

SEQ ID NO: 3477 - protein, 27 aa, synthetic construct
  VARIANT 12..26: note = EAAAK repeats may be deleted
AEAAAKEAAAKEAAAKEAAAKEAAAKA

SEQ ID NO: 3478-3517 - skipped (40 entries)

SEQ ID NO: 3518 - protein, 214 aa, synthetic construct; identical to SEQ ID NO: 239

SEQ ID NO: 3519-3527 - skipped (9 entries)

SEQ ID NO: 3528 - protein, 107 aa, synthetic construct; identical to SEQ ID NO: 256

SEQ ID NO: 3529-3556 - skipped (28 entries)

SEQ ID NO: 3557 - protein, 94 aa, synthetic construct
DTGITQTPKYLVTAMGSKRTMKREHLGHDSMYWYRQKAKKSLEFMFYYNCKEFIENKTVPNHFTPECPDSSRLYLHVVALQQEDSAAYLCTSSQ

SEQ ID NO: 3558 - protein, 96 aa, synthetic construct
EPEVTQTPSHQVTQMGQEVILRCVPISNHLYFYWYRQILGQKVEFLVSFYNNEISEKSEIFDDQFSVERPDGSNFTLKIRSTKLEDSAMYFCASSE

SEQ ID NO: 3559 - protein, 95 aa, synthetic construct
DTAVSQTPKYLVTQMGNDKSIKCEQNLGHDTMYWYKQDSKKFLKIMFSYNNKELIINETVPNRFSPKSPDKAHLNLHINSLELGDSAVYFCASSQ

SEQ ID NO: 3560 - protein, 95 aa, synthetic construct
  VARIANT 23: note = Any amino acid
DTAVSQTPKYLVTQMGKKESLKXEQNLGHNAMYWYKQDSKKFLKTMFIYSNKEPILNETVPNRFSPDSPDKAHLNLHINSLELGDSAVYFCASSQ

SEQ ID NO: 3561 - protein, 95 aa, synthetic construct
DTEVTQTPKHLVMGMTNKKSLKCEQHMGHRAMYWYKQKAKKPPELMFVYSYEKLSINESVPSRFSPECPNSSLLNLHLHALQPEDSALYLCASSQ

SEQ ID NO: 3562 - protein, 95 aa, synthetic construct
ETGVTQTPRHLVMGMTNKKSLKCEQHLGHNAMYWYKQSAKKPLELMFVYNFKEQTENNSVPSRFSPECPNSSHLFLHLHTLQPEDSALYLCASSQ

SEQ ID NO: 3563 - protein, 95 aa, synthetic construct
ETGVTQTPRHLVMGMTNKKSLKCEQHLGHNAMYWYKQSAKKPLELMFVYSLEERVENNSVPSRFSPECPNSSHLFLHLHTLQPEDSALYLCASSQ

SEQ ID NO: 3564 - protein, 95 aa, synthetic construct
KAGVTQTPRYLIKTRGQQVTLSCSPISGHRSVSWYQQTPGQGLQFLFEYFSETQRNKGNFPGRFSGRQFSNSRSEMNVSTLELGDSALYLCASSL

SEQ ID NO: 3565 - protein, 95 aa, synthetic construct
EAGVTQSPTHLIKTRGQQVTLRCSPISGHSSVSWYQQAPGQGPQFIFEYANELRRSEGNFPNRFSGRQFHDCCSEMNVSALELGDSALYLCARSL

SEQ ID NO: 3566 - protein, 95 aa, synthetic construct
ETGVTQSPTHLIKTRGQQVTLRCSSQSGHNTVSWYQQALGQGPQFIFQYYREEENGRGNFPPRFSGLQFPNYSSELNVNALELDDSALYLCASSL

SEQ ID NO: 3567 - protein, 95 aa, synthetic construct
DAGVTQSPTHLIKTRGQQVTLRCSPISGHKSVSWYQQVLGQGPQFIFQYYEKEERGRGNFPDRFSARQFPNYSSELNVNALLLGDSALYLCASSL

SEQ ID NO: 3568 - protein, 95 aa, synthetic construct
DAGVTQSPTHLIKTRGQQVTLRCSPKSGHDTVSWYQQALGQGPQFIFQYYEEEERQRGNFPDRFSGHQFPNYSSELNVNALLLGDSALYLCASSL

SEQ ID NO: 3569 - protein, 95 aa, synthetic construct
DAGVTQSPTHLIKTRGQHVTLRCSPISGHTSVSSYQQALGQGPQFIFQYYEKEERGRGNFPDQFSGHQFPNYSSELNVNALLLGDSALYLCASSL

SEQ ID NO: 3570 - protein, 95 aa, synthetic construct
EAGVTQSPTHLIKTRGQQATLRCSPISGHTSVYWYQQALGLGLQFLLWYDEGEERNRGNFPPRFSGRQFPNYSSELNVNALELEDSALYLCASSL

SEQ ID NO: 3571 - protein, 95 aa, synthetic construct
NAGVTQTPKFQVLKTGQSMTLQCAQDMNHNSMYWYRQDPGMGLRLIYYSASEGTTDKGEVPNGYNVSRLNKREFSLRLESAAPSQTSVYFCASSE

SEQ ID NO: 3572 - protein, 95 aa, synthetic construct
NAGVTQTPKFRVLKTGQSMTLLCAQDMNHEYMYWYRQDPGMGLRLIHYSVGEGTTAKGEVPDGYNVSRLKKQNFLLGLESAAPSQTSVYFCASSY

SEQ ID NO: 3573 - protein, 95 aa, synthetic construct; identical to SEQ ID NO: 3572

SEQ ID NO: 3574 - protein, 95 aa, synthetic construct
IAGITQAPTSQILAAGRRMTLRCTQDMRHNAMYWYRQDLGLGLRLIHYSNTAGTTGKGEVPDGYSVSRANTDDFPLTLASAVPSQTSVYFCASSD

SEQ ID NO: 3575 - protein, 95 aa, synthetic construct
NAGVTQTPKFQVLKTGQSMTLQCAQDMNHEYMSWYRQDPGMGLRLIHYSVGAGITDQGEVPNGYNVSRSTTEDFPLRLLSAAPSQTSVYFCASSY

SEQ ID NO: 3576 - protein, 95 aa, synthetic construct
NAGVTQTPKFRILKIGQSMTLQCTQDMNHNYMYWYRQDPGMGLKLIYYSVGAGITDKGEVPNGYNVSRSTTEDFPLRLELAAPSQTSVYFCASSY

SEQ ID NO: 3577 - protein, 95 aa, synthetic construct
NAGVTQTPKFHVLKTGQSMTLLCAQDMNHEYMYRYRQDPGKGLRLIYYSVAAALTDKGEVPNGYNVSRSNTEDFPLKLESAAPSQTSVYFCASSY

SEQ ID NO: 3578 - protein, 94 aa, synthetic construct
NAGVTQTPKFHILKTGQSMTLQCAQDMNHGYMSWYRQDPGMGLRLIYYSAAAGTTDKEVPNGYNVSRLNTEDFPLRLVSAAPSQTSVYLCASSY

SEQ ID NO: 3579 - protein, 95 aa, synthetic construct
NAGVTQTPKFHILKTGQSMTLQCAQDMNHGYLSWYRQDPGMGLRRIHYSVAAGITDKGEVPDGYNVSRSNTEDFPLRLESAAPSQTSVYFCASSY

SEQ ID NO: 3580 - protein, 96 aa, synthetic construct
GAGVSQSLRHKVAKKGKDVALRYDPISGHNALYWYRQSLGQGLEFPIYFQGKDAADKSGLPRDRFSAQRSEGSISTLKFQRTQQGDLAVYLCASSS

SEQ ID NO: 3581 - protein, 96 aa, synthetic construct
GAGVSQSPSNKVTEKGKDVELRCDPISGHTALYWYRQSLGQGLEFLIYFQGNSAPDKSGLPSDRFSAERTGGSVSTLTIQRTQQEDSAVYLCASSL

SEQ ID NO: 3582 - protein, 96 aa, synthetic construct
GAGVSQTPSNKVTEKGKYVELRCDPISGHTALYWYRQSLGQGPEFLIYFQGTGAADDSGLPNDRFFAVRPEGSVSTLKIQRTERGDSAVYLCASSL

SEQ ID NO: 3583 - protein, 96 aa, synthetic construct
GAGVSQSPRYKVAKRGRDVALRCDSISGHVTLYWYRQTLGQGSEVLTYSQSDAQRDKSGRPSGRFSAERPERSVSTLKIQRTEQGDSAVYLCASSL

SEQ ID NO: 3584 - protein, 96 aa, synthetic construct
GAGVSQSPRYKVTKRGQDVALRCDPISGHVSLYWYRQALGQGPEFLTYFNYEAQQDKSGLPNDRFSAERPEGSISTLTIQRTEQRDSAMYRCASSL

SEQ ID NO: 3585 - protein, 96 aa, synthetic construct
GAGVSQSPRYKVTKRGQDVTLRCDPISSHATLYWYQQALGQGPEFLTYFNYEAQPDKSGLPSDRFSAERPEGSISTLTIQRTEQRDSAMYRCASSL

SEQ ID NO: 3586 - protein, 96 aa, synthetic construct
GAGVSQSPRYKVAKRGQDVALRCDPISGHVSLFWYQQALGQGPEFLTYFQNEAQLDKSGLPSDRFFAERPEGSVSTLKIQRTQQEDSAVYLCASSL

SEQ ID NO: 3587 - protein, 96 aa, synthetic construct
DTGVSQNPRHKITKRGQNVTFRCDPISEHNRLYWYRQTLGQGPEFLTYFQNEAQLEKSRLLSDRFSAERPKGSFSTLEIQRTEQGDSAMYLCASSL

SEQ ID NO: 3588 - protein, 95 aa, synthetic construct
DSGVTQTPKHLITATGQRVTLRCSPRSGDLSVYWYQQSLDQGLQFLIQYYNGEERAKGNILERFSAQQFPDLHSELNLSSLELGDSALYFCASSV

SEQ ID NO: 3589 - protein, 95 aa, synthetic construct
DAEITQSPRHKITETGRQVTLACHQTWNHNNMFWYRQDLGHGLRLIHYSYGVQDTNKGEVSDGYSVSRSNTEDLPLTLESAASSQTSVYFCASSE

SEQ ID NO: 3590 - protein, 95 aa, synthetic construct
DAGITQSPRYKITETGRQVTLMCHQTWSHSYMFWYRQDLGHGLRLIYYSAAADITDKGEVPDGYVVSRSKTENFPLTLESATRSQTSVYFCASSE

SEQ ID NO: 3591 - protein, 95 aa, synthetic construct
DAGITQSPRHKVTETGTPVTLRCHQTENHRYMYWYRQDPGHGLRLIHYSYGVKDTDKGEVSDGYSVSRSKTEDFLLTLESATSSQTSVYFCAISE

SEQ ID NO: 3592 - protein, 96 aa, synthetic construct
EAEVAQSPRYKITEKSQAVAFWCDPISGHATLYWYRQILGQGPELLVQFQDESVVDDSQLPKDRFSAERLKGVDSTLKIQPAELGDSAMYLCASSL

SEQ ID NO: 3593 - protein, 96 aa, synthetic construct
EAGVAQSPRYKIIEKRQSVAFWCNPISGHATLYWYQQILGQGPKLLIQFQNNGVVDDSQLPKDRFSAERLKGVDSTLKIQPAKLEDSAVYLCASSL

SEQ ID NO: 3594 - protein, 96 aa, synthetic construct
EAGVVQSPRYKIIEKKQPVAFWCNPISGHNTLYWYLQNLGQGPELLIRYENEEAVDDSQLPKDRFSAERLKGVDSTLKIQPAELGDSAVYLCASSL

SEQ ID NO: 3595 - protein, 96 aa, synthetic construct
  VARIANT 64: note = Any amino acid
DAGVIQSPRHKVTEMGQSVTLRCEPISGHNDLLWYRQTFVQGLELLNYFCSWTLVDDSGVSKDXFSAQMPDVSFSTLRIQPMEPRDLGLYFCASSF

SEQ ID NO: 3596 - protein, 96 aa, synthetic construct
  VARIANT 52: note = Any amino acid
DAGIIQSPKHEVTEMGQTVTLRCEPIFGHNFLFWYRDTFVQGLELLSYFRSXSIIDNAGMPTERFSAERPDGSFSTLKIQPAEQGDSAVYVCASRL

SEQ ID NO: 3597 - protein, 96 aa, synthetic construct
DAGVIQSPRHEVTEMGQEVTLRCKPISGHNSLFWYRQTMMRGLELLIYFNNNVPIDDSGMPEDRFSAKMPNASFSTLKIQPSEPRDSAVYFCASSL

SEQ ID NO: 3598 - protein, 96 aa, synthetic construct
DAGVIQSPRHEVTEMGQEVTLRCKPISGHDYLFWYRQTMMRGLELLIYFNNNVPIDDSGMPEDRFSAKMPNASFSTLKIQPSEPRDSAVYFCASSL

SEQ ID NO: 3599 - protein, 96 aa, synthetic construct
DARVTQTPRHKVTEMGQEVTMRCQPILGHNTVFWYRQTMMQGLELLAYFRNRAPLDDSGMPKDRFSAEMPDATLATLKIQPSEPRDSAVYFCASGL

SEQ ID NO: 3600 - protein, 95 aa, synthetic construct
AAGVIQSPRHLIKEKRETATLKCYPIPRHDTVYWYQQGPGQDPQFLISFYEKMQSDKGSIPDRFSAQQFSDYHSELNMSSLELGDSALYFCASSL

SEQ ID NO: 3601 - protein, 96 aa, synthetic construct
EAGVTQFPSHSVIEKGQTVTLRCDPISGHDNLYWYRRVMGKEIKFLLHFVKESKQDESGMPNNRFLAERTGGTYSTLKVQPAELEDSGVYFCASSQ

SEQ ID NO: 3602 - protein, 95 aa, synthetic construct
DAMVIQNPRYQVTQFGKPVTLSCSQTLNHNVMYWYQQKSSQAPKLLFHYYDKDFNNEADTPDNFQSRRPNTSFCFLDIRSPGLGDTAMYLCATSR

SEQ ID NO: 3603 - protein, 96 aa, synthetic construct
GEEVAQTPKHLVRGEGQKAKLYCAPIKGHSYVFWYQQVLKNEFKFLISFQNENVFDETGMPKERFSAKCLPNSPCSLEIQATKLEDSAVYFCASSQ

SEQ ID NO: 3604 - protein, 95 aa, synthetic construct
EPGVSQTPRHKVTNMGQEVILRCDPSSGHMFVHWYRQNLRQEMKLLISFQYQNIAVDSGMPKERFTAERPNGTSSTLKIHPAEPRDSAVYLYSSG

SEQ ID NO: 3605 - protein, 96 aa, synthetic construct
NAGVMQNPRHLVRRRGQEARLRCSPMKGHSHVYWYRQLPEEGLKFMVYLQKENIIDESGMPKERFSAEFPKEGPSILRIQQVVRGDSAAYFCASSP

SEQ ID NO: 3606 - protein, 95 aa, synthetic construct
DGGITQSPKYLFRKEGQNVTLSCEQNLNHDAMYWYRQDPGQGLRLIYYSQIVNDFQKGDIAEGYSVSREKKESFPLTVTSAQKNPTAFYLCASSI

SEQ ID NO: 3607 - protein, 97 aa, synthetic construct
GAVVSQHPSWVICKSGTSVKIECRSLDFQATTMFWYRQFPKQSLMLMATSNEGSKATYEQGVEKDKFLINHASLTLSTLTVTSAHPEDSSFYICSAR

SEQ ID NO: 3608 - protein, 96 aa, synthetic construct
DTKVTQRPRLLVKASEQKAKMDCVPIKAHSYVYWYRKKLEEELKFLVYFQNEELIQKAEIINERFLAQCSKNSSCTLEIQSTESGDTALYFCASSK

SEQ ID NO: 3609 - protein, 96 aa, synthetic construct
HAKVTQTPGHLVKGKGQKTKMDCTPEKGHTFVYWYQQNQNKEFMLLISFQNEQVLQETEMHKKRFSSQCPKNAPCSLAILSSEPGDTALYLCASSQ

SEQ ID NO: 3610 - protein, 96 aa, synthetic construct
DADVTQTPRNRITKTGKRIMLECSQTKGHDRMYWYRQDPGLGLRLIYYSFDVKDINKGEISDGYSVSRQAQAKFSLSLESAIPNQTALYFCATSDL

SEQ ID NO: 3611 - protein, 95 aa, synthetic construct
EADIYQTPRYLVIGTGKKITLECSQTMGHDKMYWYQQDPGMELHLIHYSYGVNSTEKGDLSSESTVSRIRTEHFPLTLESARPSHTSQYLCASSE

SEQ ID NO: 3612 - protein, 95 aa, synthetic construct
  VARIANT 68: note = Any amino acid
DAVVTQFPRHRIIGTGKEFILQCSQNMNHVTMYWYRQDPGLGLKLVYYSPGTGSTEKGDISEGYHVSXNTIASFPLTLKSASTNQTSVYLYASSS

SEQ ID NO: 3613 - protein, 95 aa, synthetic construct
EAQVTQNPRYLITVTGKKLTVTCSQNMNHEYMSWYRQDPGLGLRQIYYSMNVEVTDKGDVPEGYKVSRKEKRNFPLILESPSPNQTSLYFCASSL

SEQ ID NO: 3614 - protein, 95 aa, synthetic construct
DVKVTQSSRYLVKRTGEKVFLECVQDMDHENMFWYRQDPGLGLRLIYFSYDVKMKEKGDIPEGYSVSREKKERFSLILESASTNQTSMYLCASSL

SEQ ID NO: 3615 - protein, 96 aa, synthetic construct
SAVISQKPSRDICQRGTSLTIQCQVDSQVTMMFWYRQQPGQSLTLIATANQGSEATYESGFVIDKFPISRPNLTFSTLTVSNMSPEDSSIYLCSVE

SEQ ID NO: 3616 - protein, 94 aa, synthetic construct
SQTIHQWPATLVQPVGSPLSLECTVEGTSNPNLYWYRQAAGRGLQLLFYSVGIGQISSEVPQNLSASRPQDRQFILSSKKLLLSDSGFYLCAWS

SEQ ID NO: 3617-3639 - skipped (23 entries)

SEQ ID NO: 3640 - protein, 10 aa, synthetic construct
GFNIKSAYMH

SEQ ID NO: 3641 - skipped

SEQ ID NO: 3642 - protein, 243 aa, synthetic construct
EVQLVESGGGLVQPGGSLRLSCAASGFTFSNFGMHWVRQAPGKGLEWVSYISSGSSTIYYADTLKGRFTISRDNSKNTLYLQMNSLRAEDTAVYYCARRGEGAMDYWGQGTTVTVSSGGGGSGGGGSGGGGSGGGGSDNQLTQSPSFLSASVGDRVTITCRASSSVNYIYWYQQKPGKAPKLLIYYTSNLAPGVPSRFSGSGSGNEYTLTISSLQPEDFATYYCQQFTSSPFTFGQGTKLEIK

SEQ ID NO: 3643 - protein, 16 aa, synthetic construct
GGGGSGGGGSGGGGGS

SEQ ID NO: 3644 - protein, 107 aa, synthetic construct [sequence omitted]

SEQ ID NO: 3645 - protein, 330 aa, synthetic construct
ASTKGPSVFPLAPSSKSTSGGTAALGCLVKDYFPEPVTVSWNSGALTSGVHTFPAVLQSSGLYSLSSVVTVPSSSLGTQTYICNVNHKPSNTKVDKKVEPKSCDKTHTCPPCPAPELLGGPSVFLFPPKPKDTLMISRTPEVTCVVVDVSHEDPEVKFNWYVDGVEVHNAKTKPREEQYASTYRVVSVLTVLHQDWLNGKEYKCKVSNKALPAPIEKTISKAKGQPREPQVYTLPPSREEMTKNQVSLTCLVKGFYPSDIAVEWESNGQPENNYKTTPPVLDSDGSFFLYSKLTVDKSRWQQGNVFSCSVMHEALHNHYTQKSLSLSPGK

SEQ ID NO: 3646 - protein, 334 aa, synthetic construct
ASTKGPSVFPLAPSSKSTSGGTAALGCLVKDYFPEPVTVSWNSGALTSGVHTFPAVLQSSGLYSLSSVVTVPSSSLGTQTYICNVNHKPSNTKVDKKVEPKSCDKTHTCPPCPAPELLGGPSVFLFPPKPKDTLMISRTPEVTCVVVDVSHEDPEVKFNWYVDGVEVHNAKTKPREEQYASTYRVVSVLTVLHQDWLNGKEYKCKVSNKALPAPIEKTISKAKGQPREPQVYTLPPSREEMTKNQVSLTCLVKGFYPSDIAVEWESNGQPENNYKTTPPVLDSDGSFFLYSKLTVDKSRWQQGNVFSCSVMHEALHNHYTQKSLSLSPGKEPEA

SEQ ID NO: 3647 - protein, 330 aa, synthetic construct; identical to SEQ ID NO: 41

SEQ ID NO: 3648 - protein, 227 aa, synthetic construct; identical to SEQ ID NO: 206

SEQ ID NO: 3649 - protein, 330 aa, synthetic construct; identical to SEQ ID NO: 207

SEQ ID NO: 3650 - protein, 10 aa, synthetic construct
GHDFRLTYIH

SEQ ID NO: 3651 - protein, 17 aa, synthetic construct
RVSAGSGNVKYNEKFKG

SEQ ID NO: 3652 - protein, 11 aa, synthetic construct
KASQNVGNRVV

SEQ ID NO: 3653 - protein, 7 aa, synthetic construct
SSSHRYK

SEQ ID NO: 3654 - protein, 17 aa, synthetic construct
RIYAGSGNVKYNEKFKG

SEQ ID NO: 3655 - protein, 11 aa, synthetic construct
KASQNVADRVV

SEQ ID NO: 3656 - protein, 10 aa, synthetic construct
GHDFKLTYIH

SEQ ID NO: 3657 - protein, 17 aa, synthetic construct
RVSAGSGNTKYNEKFKG

SEQ ID NO: 3658 - protein, 11 aa, synthetic construct
KASQNVGDRVA

SEQ ID NO: 3659 - protein, 17 aa, synthetic construct
RVYAGSGNTKYNEKFKG

SEQ ID NO: 3660 - protein, 11 aa, synthetic construct
KASQNVEDRVV

SEQ ID NO: 3661 - protein, 17 aa, synthetic construct
RISAGSGNTKYNEKFKG

SEQ ID NO: 3662 - protein, 11 aa, synthetic construct
KASQNVGDRVV

SEQ ID NO: 3663 - protein, 17 aa, synthetic construct
RIYAGSGNTKYNEKFKG

SEQ ID NO: 3664 - protein, 9 aa, synthetic construct
LQHNSYPLT

SEQ ID NO: 3665 - protein, 17 aa, synthetic construct
RVSAGSGNVNYAQKFQG

SEQ ID NO: 3666 - protein, 11 aa, synthetic construct
RASQNVDNRLG

SEQ ID NO: 3667 - protein, 11 aa, synthetic construct
KASQNVDNRVA

SEQ ID NO: 3668 - protein, 7 aa, synthetic construct
AASSLQK

SEQ ID NO: 3669 - protein, 449 aa, synthetic construct
ITCPPPMSVEHADIWVKSYSLYSRERYICNSGFKRKAGTSSLTECVLNKATNVAHWTTPSLKCIRDPALVHQRPAPPSGGSGGGGSGGGSGGGGSGGGNWVNVISDLKKIEDLIQSMHIDATLYTESDVHPSCKVTAMKCFLLELQVISLESGDASIHDTVENLIILANNSLSSNGNVTESGCKECEELEEKNIKEFLQSFVHIVAMFINTSGGGGSGGGGSDKTHTCPPCPAPELLGGPSVFLFPPKPKDTLMISRTPEVTCVVVDVSHEDPEVKFNWYVDGVEVHNAKTKPREEQYASTYRVVSVLTVLHQDWLNGKEYKCKVSNKALPAPIEKTISKAKGQPREPQVYTLPPCREEMTKNQVSLWCLVKGFYPSDIAVEWESNGQPENNYKTTPPVLDSDGSFFLYSKLTVDKSRWQQGNVFSCSVMHEALHNHYTQKSLSLSPGK

SEQ ID NO: 3670 - protein, 114 aa, synthetic construct
NWVNVISDLKKIEDLIQSMHIDATLYTESDVHPSCKVTAMKCFLLELQVISLESGDASIHDTVENLIILANNSLSSNGNVTESGCKECEELEEKNIKEFLQSFVHIVAMFINTS

SEQ ID NO: 3671 - protein, 212 aa, synthetic construct
ITCPPPMSVEHADIWVKSYSLYSRERYICNSGFKRKAGTSSLTECVLNKATNVAHWTTPSLKCIRDPALVHQRPAPPSGGSGGGGSGGGSGGGGSGGGNWVNVISDLKKIEDLIQSMHIDATLYTESDVHPSCKVTAMKCFLLELQVISLESGDASIHDTVENLIILANNSLSSNGNVTESGCKECEELEEKNIKEFLQSFVHIVAMFINTS

SEQ ID NO: 3672 - protein, 449 aa, synthetic construct
ITCPPPMSVEHADIWVKSYSLYSRERYICNSGFKRKAGTSSLTECVLNKATNVAHWTTPSLKCIRDPALVHQRPAPPSGGSGGGGSGGGSGGGGSGGGNWVNVISDLKKIEDLIQSMHIDATLYTESDVHPSCKVTAMKCFLLELQVISLESGDASIHDTVEQLIILANNSLSSNGNVTESGCKECEELEEKNIKEFLQSFVHIVQMFINTSGGGGSGGGGSDKTHTCPPCPAPELLGGPSVFLFPPKPKDTLMISRTPEVTCVVVDVSHEDPEVKFNWYVDGVEVHNAKTKPREEQYASTYRVVSVLTVLHQDWLNGKEYKCKVSNKALPAPIEKTISKAKGQPREPQVYTLPPCREEMTKNQVSLWCLVKGFYPSDIAVEWESNGQPENNYKTTPPVLDSDGSFFLYSKLTVDKSRWQQGNVFSCSVMHEALHNHYTQKSLSLSPGK

SEQ ID NO: 3673 - protein, 114 aa, synthetic construct
NWVNVISDLKKIEDLIQSMHIDATLYTESDVHPSCKVTAMKCFLLELQVISLESGDASIHDTVEQLIILANNSLSSNGNVTESGCKECEELEEKNIKEFLQSFVHIVQMFINTS

SEQ ID NO: 3674 - protein, 212 aa, synthetic construct
ITCPPPMSVEHADIWVKSYSLYSRERYICNSGFKRKAGTSSLTECVLNKATNVAHWTTPSLKCIRDPALVHQRPAPPSGGSGGGGSGGGSGGGGSGGGNWVNVISDLKKIEDLIQSMHIDATLYTESDVHPSCKVTAMKCFLLELQVISLESGDASIHDTVEQLIILANNSLSSNGNVTESGCKECEELEEKNIKEFLQSFVHIVQMFINTS

SEQ ID NO: 3675-3701 - skipped (27 entries)

SEQ ID NO: 3702 - protein, 7 aa, synthetic construct
FRLTYIH

SEQ ID NO: 3703-3790 - skipped (88 entries)

SEQ ID NO: 3791 - protein, 447 aa, synthetic construct; identical to SEQ ID NO: 302

SEQ ID NO: 3792 - protein, 328 aa, synthetic construct; identical to SEQ ID NO: 3452

SEQ ID NO: 3793 - protein, 368 aa, synthetic construct; identical to SEQ ID NO: 3350

SEQ ID NO: 3794 - protein, 225 aa, synthetic construct; identical to SEQ ID NO: 3454

SEQ ID NO: 3795 - protein, 449 aa, synthetic construct; identical to SEQ ID NO: 3328

SEQ ID NO: 3796 - protein, 218 aa, synthetic construct; identical to SEQ ID NO: 3329

SEQ ID NO: 3797 - protein, 111 aa, synthetic construct; identical to SEQ ID NO: 3451

SEQ ID NO: 3798 - protein, 449 aa, synthetic construct; identical to SEQ ID NO: 3420

SEQ ID NO: 3799 - protein, 212 aa, synthetic construct; identical to SEQ ID NO: 3474

SEQ ID NO: 3800 - protein, 631 aa, synthetic construct
QVQLVQSGAEVKKPGSSVKVSCKASGHDFRLTYIHWVRQAPGQGLEWMGRVSAGSGNVKYNEKFKGRVTITADTSTSTAYMELSSLRSEDTAVYYCAVSYYSYDVLDYWGQGTTVTVSSGGGGSGGGGSGGGGSGGGGSDIQMTQSPSFLSASVGDRVTITCKASQNVADRVVWHQQKPGKAPKALIYSSSHRYKGVPSRFSGSGSGTEFTLTISSLQPEDFATYFCQQFKSYPLTFGQGTKLEIKGGGGSGGGGSGGGGSAPTSSSTKKTQLQLEHLLLDLQMILNGINNYKNPKLTRMLTFKFYMPKKATELKHLQCLEEELKPLEEVLNLAQSKNFHLRPRDLISNINVIVLELKGSETTFMCEYADETATIVEFLNRWITFAQSIISTLTGGGGSGGGGSDKTHTCPPCPAPELLGGPSVFLFPPKPKDTLMISRTPEVTCVVVDVSHEDPEVKFNWYVDGVEVHNAKTKPREEQYASTYRVVSVLTVLHQDWLNGKEYKCKVSNKALPAPIEKTISKAKGQPREPQVYTLPPCREEMTKNQVSLWCLVKGFYPSDIAVEWESNGQPENNYKTTPPVLDSDGSFFLYSKLTVDKSRWQQGNVFSCSVMHEALHNHYTQKSLSLSPGK

SEQ ID NO: 3801 - protein, 20 aa, synthetic construct
GGGGSGGGGSGGGGSGGGGS

SEQ ID NO: 3802 - protein, 243 aa, synthetic construct
QVQLVQSGAEVKKPGASVKVSCKASGYTFTGYYMHWVRQAPGQGLEWMGWINPNSGDTNYAQKFQGRVTMTRDTSISTAYMELSRLTSDDTAVYYCARDANIAALDAFEIWGQGTMVTVSSGGGGSGGGGSGGGGSDIQMTQSPSSLSASVGDRVTITCRASQSISSYLNWYQQKPGKAPKLLIYAASSLQSGVPSRFSGSGSGTDFTLTISSLQPEDFATYYCQQSYSTPLTFGGGTKVEIK

SEQ ID NO: 3803 - protein, 984 aa, synthetic construct
QVQLQESGPGLVKPSETLSLTCTVSGASISSFYWSWIRQPPGKCLEWIGYIYYSGTTNYNPSLKSRVTISVDTSKNQFSLKLSSVTAADTAVYYCARIAVAGFFFDYWGQGTLVTVSSGGGGSGGGGSGGGGSEIVLTQSPGTLSLSPGERATLSCRASQSVNKNYLAWYQQKPGQAPRLLIYGASSRATGIPDRFSGSGSGTDFTLTISRLEPEDFAVYYCQQYDRSPLTFGCGTKVEIKSGGGGSEVQLVESGGGLVQPGGSLKLSCAASGFTFNKYAMNWVRQAPGKGLEWVARIRSKYNNYATYYADSVKDRFTISRDDSKNTAYLQMNNLKTEDTAVYYCVRHGNFGNSYISYWAYWGQGTLVTVSSGGGGSGGGGSGGGGSQTVVTQEPSLTVSPGGTVTLTCGSSTGAVTSGNYPNWVQQKPGQAPRGLIGGTKFLAPGTPARFSGSLLGGKAALTLSGVQPEDEAEYYCVLWYSNRWVFGGGTKLTVLGGGGDKTHTCPPCPAPELLGGPSVFLFPPKPKDTLMISRTPEVTCVVVDVSHEDPEVKFNWYVDGVEVHNAKTKPCEEQYGSTYRCVSVLTVLHQDWLNGKEYKCKVSNKALPAPIEKTISKAKGQPREPQVYTLPPSREEMTKNQVSLTCLVKGFYPSDIAVEWESNGQPENNYKTTPPVLDSDGSFFLYSKLTVDKSRWQQGNVFSCSVMHEALHNHYTQKSLSLSPGKGGGGSGGGGSGGGGSGGGGSGGGGSGGGGSDKTHTCPPCPAPELLGGPSVFLFPPKPKDTLMISRTPEVTCVVVDVSHEDPEVKFNWYVDGVEVHNAKTKPCEEQYGSTYRCVSVLTVLHQDWLNGKEYKCKVSNKALPAPIEKTISKAKGQPREPQVYTLPPSREEMTKNQVSLTCLVKGFYPSDIAVEWESNGQPENNYKTTPPVLDSDGSFFLYSKLTVDKSRWQQGNVFSCSVMHEALHNHYTQKSLSLSPGK

SEQ ID NO: 3804 - protein, 107 aa, synthetic construct; identical to SEQ ID NO: 105

SEQ ID NO: 3805 - protein, 119 aa, synthetic construct
QVQLVQSGAEVKKPGSSVKVSCKASGHDFDKFYIHWVRQAPGQGLEWMGRIFAGSGNVKYNEKFKGRVTITADTSTSTAYMELSSLRSEDTAVYYCAGSYYSYDVLDYWGQGTTVTVSS

SEQ ID NO: 3806 - protein, 246 aa, synthetic construct
QVQLVQSGAEVKKPGSSVKVSCKASGTDFKLTYIHWVRQAPGQGLEWMGRVSPGSGNVKYNEKFKGRVTITADTSTSTAYMELSSLRSEDTAVYYCAGSYYSYDVLDYWGQGTTVTVSSGGGGSGGGGSGGGGSGGGGSDIQMTQSPSFLSASVGDRVTITCKASQNVGDRVAWYQQKPGKAPKALIYSSSHRYKGVPSRFSGSGSGTEFTLTISSLQPEDFATYFCQQFKSYPLTFGQGTKLEIK

SEQ ID NO: 3807 - protein, 246 aa, synthetic construct; identical to SEQ ID NO: 110

SEQ ID NO: 3808 - protein, 119 aa, synthetic construct; identical to SEQ ID NO: 91

SEQ ID NO: 3809 - protein, 246 aa, synthetic construct
QVQLVQSGAEVKKPGSSVKVSCKASGTDFHLWYIHWVRQAPGQGLEWMGRVFAGSGSYRYNEKFKGRVTITADTSTSTAYMELSSLRSEDTAVYYCAGSYYSYDVLDYWGQGTTVTVSSGGGGSGGGGSGGGGSGGGGSDIQMTQSPSFLSASVGDRVTITCKASQNVDDRVAWYQQKPGKAPKALIYSSSHRYKGVPSRFSGSGSGTEFTLTISSLQPEDFATYFCQQFKSYPLTFGQGTKLEIK

SEQ ID NO: 3810 - protein, 119 aa, synthetic construct
QVQLVQSGAEVKKPGSSVKVSCKASGTDFHLWYIHWVRQAPGQGLEWMGRVFAGSGSYRYNEKFKGRVTITADTSTSTAYMELSSLRSEDTAVYYCAGSYYSYDVLDYWGQGTTVTVSS

SEQ ID NO: 3811 - protein, 246 aa, synthetic construct
QVQLVQSGAEVKKPGSSVKVSCKASGTDFDKIYIHWVRQAPGQGLEWMGRISAGSGNTKYNEKFKGRVTITADTSTSTAYMELSSLRSEDTAVYYCAGSYYSYDVLDYWGQGTTVTVSSGGGGSGGGGSGGGGSGGGGSDIQMTQSPSFLSASVGDRVTITCKASQNVADRVAWYQQKPGKAPKALIYSSSHRYKGVPSRFSGSGSGTEFTLTISSLQPEDFATYFCQQFKSYPLTFGQGTKLEIK

SEQ ID NO: 3812 - protein, 246 aa, synthetic construct
QVQLVQSGAEVKKPGSSVKVSCKASGTDFKLTYIHWVRQAPGQGLEWMGRISAGSGNTKYNEKFKGRVTITADTSTSTAYMELSSLRSEDTAVYYCAGSYYSYDVLDYWGQGTTVTVSSGGGGSGGGGSGGGGSGGGGSDIQMTQSPSFLSASVGDRVTITCKASQNVEDRVAWYQQKPGKAPKALIYSSSHRYKGVPSRFSGSGSGTEFTLTISSLQPEDFATYFCQQFKSYPLTFGQGTKLEIK

SEQ ID NO: 3813 - protein, 119 aa, synthetic construct
QVQLVQSGAEVKKPGSSVKVSCKASGTDFKLTYIHWVRQAPGQGLEWMGRISAGSGNTKYNEKFKGRVTITADTSTSTAYMELSSLRSEDTAVYYCAGSYYSYDVLDYWGQGTTVTVSS

SEQ ID NO: 3814 - protein, 119 aa, synthetic construct
QVQLVQSGAEVKKPGSSVKVSCKASGHDFDKFYIHWVRQAPGQGLEWMGRVSAGSGNTKYNEKFKGRVTITADTSTSTAYMELSSLRSEDTAVYYCAGSYYSYDVLDYWGQGTTVTVSS

SEQ ID NO: 3815 - protein, 246 aa, synthetic construct
QVQLVQSGAEVKKPGSSVKVSCKASGYSFTTYYIHWVRQAPGQGLEWMGWFSAGSGNTKYNEKFKGRVTITADTSTSTAYMELSSLRSEDTAVYYCAVSYYSYDVLDYWGQGTTVTVSSGGGGSGGGGSGGGGSGGGGSDIQMTQSPSFLSASVGDRVTITCKASQNVGINVVWHQQKPGKAPKALIYSSSHRYSGVPSRFSGSGSGTEFTLTISSLQPEDFATYFCQQFKSYPLTFGQGTKLEIK

SEQ ID NO: 3816 - protein, 119 aa, synthetic construct
QVQLVQSGAEVKKPGSSVKVSCKASGYSFTTYYIHWVRQAPGQGLEWMGWFSAGSGNTKYNEKFKGRVTITADTSTSTAYMELSSLRSEDTAVYYCAVSYYSYDVLDYWGQGTTVTVSS

SEQ ID NO: 3817 - protein, 449 aa, synthetic construct
EVQLVESGGGLVQPGASLKLSCVASGFTFSDYWMSWVRQTPGKTMEWIGNIKYDGSHTNYAPSLKNRFTISRDNAKSTLFLQMSNVRSEDTATYYCTRESHYGYIYPFDYWGQGVMVTVSSAKTTAPSVYPLAPVCGDTTGSSVTLGCLVKGYFPEPVTLTWNSGSLSSGVHTFPAVLQSDLYTLSSSVTVTSSTWPSQSITCNVAHPASSTKVDKKIEPRGPTIKPCPPCKCPAPNAAGGPSVFIFPPKIKDVLMISLSPIVTCVVVDVSEDDPDVQISWFVNNVEVHTAQTQTHREDYNSTLRVVSALPIQHQDWMSGKEFKCKVNNKDLGAPIERTISKPKGSVRAPQVCVLPPPEEEMTKKQVTLSCAVTDFMPEDIYVEWTNNGKTELNYKNTEPVLDSDGSYFMVSKLRVEKKNWVERNSYSCSVVHEGLHNHHTTKSFSRTP

SEQ ID NO: 3818 - protein, 20 aa, synthetic construct
SGGSGGGGSGGGSGGGGSLQ

SEQ ID NO: 3819 - protein, 250 aa, synthetic construct
QVQLVQSGAEVKKPGASVKVSCKASGYTFTNYYMHWVRQAPGQGLEWMGIINPSDASTSYAQKFQGRVTMTRDTSTNTVYMDLSSLRSEDTAVYYCARGGNSAFYSYYDMDVWGQGTTVTVSSGGGGSGGGGSGGGGSDVVMTQTPLSLPVTLGQPASISCRSSQSLVYRDANTYLSWFQQRPGQSPRRLIYKVSNWQSGVPDRFSGSGSGTDFTLKISRVEAEDVGVYYCMQGTHWPPTFGQGTKVEIK

SEQ ID NO: 3820 - protein, 250 aa, synthetic construct
QVQLVQSGAEVKKPGASVKVSCKASGYTFTNYYMHWVRQAPGLCLEWMGIINPSDGSTSYAQKFQGRVTMTRDTSTNTVYMDLSSLRSEDTAVYYCARGGNSAFYSYYDMDVWGQGTTVTVSSGGGGSGGGGSGGGGSDVVMTQTPLSLPVTLGQPASISCRSSQSLVYRDGNTYLSWFQQRPGQSPRRLIYKVSNWQSGVPDRFSGGGSGTDFTLKISRVEAEDVGVYYCMQGTHWPPTFGCGTKVEIK

SEQ ID NO: 3821 - protein, 250 aa, synthetic construct
QVQLVQSGAEVKKPGASVKVSCKASGYTFTNYYMHWVRQAPGLCLEWMGIINPSDGSTSYAQKFQGRVTMTRDTSTNTVYMDLSSLRSEDTAVYYCARGGNSAFYSYYDMDVWGQGTTVTVSSGGGGSGGGGSGGGGSDVVMTQTPLSLPVTLGQPASISCRSSQSLVYREGNTYLSWFQQRPGQSPRRLIYKVSNWQSGVPDRFSGGGSGTDFTLKISRVEAEDVGVYYCMQGTHWPPTFGCGTKVEIK

SEQ ID NO: 3822 - protein, 505 aa, synthetic construct
QVQLVQSGAEVKKPGASVKVSCKASGYTFTNYYMHWVRQAPGLGLEWMGIINPSDGSTSYAQKFQGRVTMTRDTSTNTVYMDLSSLRSEDTAVYYCARGGNSAFYSYYDMDVWGQGTTVTVSSGGGGSGGGGSGGGGSDVVMTQTPLSLPVTLGQPASISCRSSQSLVYRDGQTYLSWFQQRPGQSPRRLIYKVSNWQSGVPDRFSGGGSGTDFTLKISRVEAEDVGVYYCMQGTHWPPTFGQGTKVEIKSGGGGSEVQLVESGGGLVQPGGSLKLSCAASGFTFNKYAMNWVRQAPGKGLEWVARIRSKYNNYATYYADSVKDRFTISRDDSKNTAYLQMNNLKTEDTAVYYCVRHGNFGNSYISYWAYWGQGTLVTVSSGGGGSGGGGSGGGGSQTVVTQEPSLTVSPGGTVTLTCGSSTGAVTSGNYPNWVQQKPGQAPRGLIGGTKFLAPGTPARFSGSLLGGKAALTLSGVQPEDEAEYYCVLWYSNRWVFGGGTKLTVL

SEQ ID NO: 3823 - protein, 505 aa, synthetic construct
QVQLVQSGAEVKKPGASVKVSCKASGYTFTNYYMHWVRQAPGLCLEWMGIINPSDGSTSYAQKFQGRVTMTRDTSTNTVYMDLSSLRSEDTAVYYCARGGNSAFYSYYDMDVWGQGTTVTVSSGGGGSGGGGSGGGGSDVVMTQTPLSLPVTLGQPASISCRSSQSLVYREGNTYLSWFQQRPGQSPRRLIYKVSNWQSGVPDRFSGGGSGTDFTLKISRVEAEDVGVYYCMQGTHWPPTFGCGTKVEIKSGGGGSEVQLVESGGGLVQPGGSLKLSCAASGFTFNKYAMNWVRQAPGKGLEWVARIRSKYNNYATYYADSVKDRFTISRDDSKNTAYLQMNNLKTEDTAVYYCVRHGNFGNSYISYWAYWGQGTLVTVSSGGGGSGGGGSGGGGSQTVVTQEPSLTVSPGGTVTLTCGSSTGAVTSGNYPNWVQQKPGQAPRGLIGGTKFLAPGTPARFSGSLLGGKAALTLSGVQPEDEAEYYCVLWYSNRWVFGGGTKLTVL

SEQ ID NO: 3824 - protein, 505 aa, synthetic construct
QVQLVQSGAEVKKPGASVKVSCKASGYTFTNYYMHWVRQAPGQCLEWMGIINPSDASTSYAQKFQGRVTMTRDTSTNTVYMDLSSLRSEDTAVYYCARGGNSAFYSYYDMDVWGQGTTVTVSSGGGGSGGGGSGGGGSDVVMTQTPLSLPVTLGQPASISCRSSQSLVYRDANTYLSWFQQRPGQSPRRLIYKVSNWQSGVPDRFSGSGSGTDFTLKISRVEAEDVGVYYCMQGTHWPPTFGCGTKVEIKSGGGGSEVQLVESGGGLVQPGGSLKLSCAASGFTFNKYAMNWVRQAPGKGLEWVARIRSKYNNYATYYADSVKDRFTISRDDSKNTAYLQMNNLKTEDTAVYYCVRHGNFGNSYISYWAYWGQGTLVTVSSGGGGSGGGGSGGGGSQTVVTQEPSLTVSPGGTVTLTCGSSTGAVTSGNYPNWVQQKPGQAPRGLIGGTKFLAPGTPARFSGSLLGGKAALTLSGVQPEDEAEYYCVLWYSNRWVFGGGTKLTVL

SEQ ID NO: 3825 - protein, 993 aa, synthetic construct
QVQLVQSGAEVKKPGASVKVSCKASGYTFTNYYMHWVRQAPGLCLEWMGIINPSDGSTSYAQKFQGRVTMTRDTSTNTVYMDLSSLRSEDTAVYYCARGGNSAFYSYYDMDVWGQGTTVTVSSGGGGSGGGGSGGGGSDVVMTQTPLSLPVTLGQPASISCRSSQSLVYRDGNTYLSWFQQRPGQSPRRLIYKVSNWQSGVPDRFSGGGSGTDFTLKISRVEAEDVGVYYCMQGTHWPPTFGCGTKVEIKSGGGGSEVQLVESGGGLVQPGGSLKLSCAASGFTFNKYAMNWVRQAPGKGLEWVARIRSKYNNYATYYADSVKDRFTISRDDSKNTAYLQMNNLKTEDTAVYYCVRHGNFGNSYISYWAYWGQGTLVTVSSGGGGSGGGGSGGGGSQTVVTQEPSLTVSPGGTVTLTCGSSTGAVTSGNYPNWVQQKPGQAPRGLIGGTKFLAPGTPARFSGSLLGGKAALTLSGVQPEDEAEYYCVLWYSNRWVFGGGTKLTVLGGGGDKTHTCPPCPAPELLGGPSVFLFPPKPKDTLMISRTPEVTCVVVDVSHEDPEVKFNWYVDGVEVHNAKTKPCEEQYGSTYRCVSVLTVLHQDWLNGKEYKCKVSNKALPAPIEKTISKAKGQPREPQVYTLPPSREEMTKNQVSLTCLVKGFYPSDIAVEWESNGQPENNYKTTPPVLDSDGSFFLYSKLTVDKSRWQQGNVFSCSVMHEALHNHYTQKSLSLSPGKGGGGSGGGGSGGGGSGGGGSGGGGSGGGGSDKTHTCPPCPAPELLGGPSVFLFPPKPKDTLMISRTPEVTCVVVDVSHEDPEVKFNWYVDGVEVHNAKTKPCEEQYGSTYRCVSVLTVLHQDWLNGKEYKCKVSNKALPAPIEKTISKAKGQPREPQVYTLPPSREEMTKNQVSLTCLVKGFYPSDIAVEWESNGQPENNYKTTPPVLDSDGSFFLYSKLTVDKSRWQQGNVFSCSVMHEALHNHYTQKSLSLSPGK

SEQ ID NO: 3826 - protein, 40 aa, Homo sapiens
SGVTCADGPCFNGGLCVGGADPDSAYICHCPPGFQGSNCE

SEQ ID NO: 3827 - protein, 101 aa, synthetic construct
IAGITQAPTSQILAAGRRMTLRCTQDMRHNAMYWYRQDLGLGLRLIHYSNTAGTTGKGEVPDGYSVSRANTDDFPLTLASAVPSQTSVYFCASSWSFGTEA

SEQ ID NO: 3828 - protein, 100 aa, synthetic construct
GVTQTPKFQVLKTGQSMTLQCAQDMNHEYMSWYRQDPGMGLRLIHYSVGAGITDQGEVPNGYNVSRSTTEDFPLRLLSAAPSQTSVYFCASSYVGNTGEL

SEQ ID NO: 3829 - protein, 100 aa, synthetic construct
KVTQSSRYLVKRTGEKVFLECVQDMDHENMFWYRQDPGLGLRLIYFSYDVKMKEKGDIPEGYSVSREKKERFSLILASASTDQTSMYLCASSFLGTGVEQ

SEQ ID NO: 3830 - protein, 100 aa, synthetic construct
GGITQSPKYLFRKEGQNVTLSCEQNLNHDAMYWYRQDPGQGLRLIYYSQIVNDFQKGDIAEGYSVSREKKESFPLTVTSAQKNPTAFYLCASSSRSSYEQ

SEQ ID NO: 3831 - protein, 101 aa, synthetic construct
GVTQTPKHLITATGQRVTLRCSPRSGDLSVYWYQQSLDQGLQFLIQYYNGEERAKGNILERFSAQQFPDLHSELNLSSLELGDSALYFCASSVAGTPSYEQ

SEQ ID NO: 3832 - protein, 100 aa, synthetic construct
AGVTQTPRYLIKTRGQQVTLSCSPISGHRSVSWYQQTPGQGLQFLFEYFSETQRNKGNFPGRFSGRQFSNSRSEMNVSTLELGDSALYLCASSFNMATGQ

SEQ ID NO: 3833 - protein, 106 aa, synthetic construct
AVVSQHPSRVIVKSGTSVKIECRSLDFQATTMFWYRQFPKQSLMLMATSNEGSKATYEQGVEKDKFLINHASLTLSTLTVTSAHPEDSGFYICSALAGSGSSTDTQ

SEQ ID NO: 3834 - protein, 106 aa, synthetic construct
MDAGVIQSPRHEVTEMGQQVTLRCKPISGHDYLFWYRQTMMRGLELLIYFNNNVPIDDSGMPEDRFSAKMPNASFSTLKIQPSEPRDSAVYFCASSLWEKLAKNIQ

SEQ ID NO: 3835 - protein, 107 aa, synthetic construct; identical to SEQ ID NO: 93

SEQ ID NO: 3836 - protein, 107 aa, synthetic construct; identical to SEQ ID NO: 117

SEQ ID NO: 3837 - protein, 107 aa, synthetic construct; identical to SEQ ID NO: 199

SEQ ID NO: 3838 - protein, 107 aa, synthetic construct; identical to SEQ ID NO: 181

SEQ ID NO: 3839 - protein, 107 aa, synthetic construct; identical to SEQ ID NO: 87

SEQ ID NO: 3840 - protein, 107 aa, synthetic construct; identical to SEQ ID NO: 160

SEQ ID NO: 3841 - protein, 107 aa, synthetic construct; identical to SEQ ID NO: 147

SEQ ID NO: 3842 - protein, 107 aa, synthetic construct; identical to SEQ ID NO: 141

SEQ ID NO: 3843 - protein, 107 aa, synthetic construct; identical to SEQ ID NO: 81

SEQ ID NO: 3844 - protein, 107 aa, synthetic construct; identical to SEQ ID NO: 90

SEQ ID NO: 3845 - protein, 107 aa, synthetic construct; identical to SEQ ID NO: 105

SEQ ID NO: 3846 - protein, 107 aa, synthetic construct; identical to SEQ ID NO: 99

SEQ ID NO: 3847 - protein, 107 aa, synthetic construct; identical to SEQ ID NO: 108

SEQ ID NO: 3848 - protein, 119 aa, synthetic construct; identical to SEQ ID NO: 221

SEQ ID NO: 3849 - protein, 119 aa, synthetic construct; identical to SEQ ID NO: 223

SEQ ID NO: 3850 - protein, 119 aa, synthetic construct; identical to SEQ ID NO: 225

SEQ ID NO: 3851 - protein, 120 aa, synthetic construct
QVQLVQSGAEVKKPGSSVKVSCKASGYSFTTYYIHWVRQAPGQGLEWMGWFFPGSGNIKYNEKFKGRVTITADTSSTSTAYMELSSLRSEDTAVYFCAGSIYSAGVLDYWGQGTTVTVSS

SEQ ID NO: 3852 - protein, 119 aa, synthetic construct; identical to SEQ ID NO: 217

SEQ ID NO: 3853 - protein, 120 aa, synthetic construct
QVQLVQSGAEVKKPGSSVKVSCKASGYSFTTYYIHWVRQAPGQGLEWIMGWFFPGSGNTKYNEKFKGRVTITADTSTSTAYMELSSLRSEDTAVYYCAGSYYSYDVLDYWGQGTTVTVSS

SEQ ID NO: 3854 - protein, 119 aa, synthetic construct; identical to SEQ ID NO: 215

SEQ ID NO: 3855 - protein, 119 aa, synthetic construct; identical to SEQ ID NO: 213

SEQ ID NO: 3856 - protein, 121 aa, synthetic construct
QVQLVQSGAEVKKPGSSVKVSCKASGYSFTTYYIHWVRQAPGQGLEWMGWFSAGSGNTKYNEKFKGRVTITADTSTSTAYMELSSLRSEESDTAVYYCAVSYYSYDVLDYWGQGTTVTVSS

SEQ ID NO: 3857 - protein, 120 aa, synthetic construct
QVQLVQSGAEVKKPGSSVKVSCKASGYSFTTYYIHWVRQAPGQGLEWMGWFSAGSGNITKYNEKFKGRVTITADTSTSTAYMELSSLRSEDTAVYYCAGSYYSYDVLDYWGQGTTVTVSS

SEQ ID NO: 3858 - protein, 119 aa, synthetic construct; identical to SEQ ID NO: 121

SEQ ID NO: 3859 - protein, 119 aa, synthetic construct; identical to SEQ ID NO: 182

SEQ ID NO: 3860 - protein, 119 aa, synthetic construct; identical to SEQ ID NO: 176

SEQ ID NO: 3861 - protein, 119 aa, synthetic construct; identical to SEQ ID NO: 158

SEQ ID NO: 3862 - protein, 119 aa, synthetic construct; identical to SEQ ID NO: 155

SEQ ID NO: 3863 - protein, 119 aa, synthetic construct; identical to SEQ ID NO: 118

SEQ ID NO: 3864 - protein, 119 aa, synthetic construct; identical to SEQ ID NO: 82

SEQ ID NO: 3865 - protein, 119 aa, synthetic construct; identical to SEQ ID NO: 106

SEQ ID NO: 3866 - protein, 120 aa, synthetic construct
QVQLVQSGAEVKKPGSSVKVSCKASGTDFKLTYIHWVRQAPGQGLEWMGRISPGSGNVKYNEKFKGRVTITADTSTSTAYMELSSLRSEDTAVYFYCAGSYYSYDVLDYWGQGTTVTVSS

SEQ ID NO: 3867 - protein, 119 aa, synthetic construct; identical to SEQ ID NO: 124

SEQ ID NO: 3868 - protein, 119 aa, synthetic construct; identical to SEQ ID NO: 94

SEQ ID NO: 3869 - protein, 119 aa, synthetic construct
QVQLVQSGAEVKKPGSSVKVSCKASGTDFKLTYIHWVRQAPGQGLEWMGRIFPGSGNTKYNEKFKGRVTLTADTSTSTAYMELSSLRSEDTAVYYCAGSYYSYDVLDYWGQGTTVTVSS

SEQ ID NO: 3870 - protein, 119 aa, synthetic construct; identical to SEQ ID NO: 197

SEQ ID NO: 3871 - protein, 119 aa, synthetic construct; identical to SEQ ID NO: 130

SEQ ID NO: 3872 - protein, 119 aa, synthetic construct; identical to SEQ ID NO: 3813

SEQ ID NO: 3873 - protein, 119 aa, synthetic construct; identical to SEQ ID NO: 142

SEQ ID NO: 3874 - protein, 120 aa, synthetic construct
QVQLVQSGAEVKKPGSSVKVSCKASGHDFKLTYIHWVKRQAPGQGLEWMGRISAGSGNVKYNEKFKGRVTITADTSTSTAYMELSSLRSEDTAVYYCAGSYYSYDVLDYWGQGTTVTVSS

SEQ ID NO: 3875 - protein, 119 aa, synthetic construct; identical to SEQ ID NO: 139

SEQ ID NO: 3876 - protein, 119 aa, synthetic construct; identical to SEQ ID NO: 185

SEQ ID NO: 3877 - protein, 119 aa, synthetic construct; identical to SEQ ID NO: 133

SEQ ID NO: 3878 - protein, 119 aa, synthetic construct; identical to SEQ ID NO: 188

SEQ ID NO: 3879 - protein, 119 aa, synthetic construct; identical to SEQ ID NO: 109

SEQ ID NO: 3880 - protein, 119 aa, synthetic construct; identical to SEQ ID NO: 97

SEQ ID NO: 3881 - protein, 119 aa, synthetic construct; identical to SEQ ID NO: 85

SEQ ID NO: 3882 - protein, 119 aa, synthetic construct; identical to SEQ ID NO: 115

SEQ ID NO: 3883 - protein, 119 aa, synthetic construct; identical to SEQ ID NO: 191

SEQ ID NO: 3884 - protein, 119 aa, synthetic construct; identical to SEQ ID NO: 136

SEQ ID NO: 3885 - protein, 119 aa, synthetic construct; identical to SEQ ID NO: 3814

SEQ ID NO: 3886 - protein, 119 aa, synthetic construct; identical to SEQ ID NO: 3805

SEQ ID NO: 3887 - protein, 119 aa, synthetic construct; identical to SEQ ID NO: 205

SEQ ID NO: 3888 - protein, 119 aa, synthetic construct; identical to SEQ ID NO: 100

SEQ ID NO: 3889 - protein, 119 aa, synthetic construct; identical to SEQ ID NO: 179

SEQ ID NO: 3890 - protein, 119 aa, synthetic construct; identical to SEQ ID NO: 88

SEQ ID NO: 3891 - protein, 119 aa, synthetic construct; identical to SEQ ID NO: 3810

SEQ ID NO: 3892 - protein, 119 aa, synthetic construct
QVQLVQSGAEVKKPGSSVKVSCKASGHDFHLWYIHWVRQAPGQGLEWMGRISPGSGNVKYNEKFKGRVTLTADTSTSTAYMELSSLRSEDTAVYYCAGSYYSYDVLDYWGQGTTVTVSS

SEQ ID NO: 3893 - protein, 120 aa, synthetic construct
QVQLVQSGAEVKKPGSSVKVSCKASGHDFHLWYIHWVRQAPGQGLEWMGRVSAGSGNVKYQVQLVQSGAEVKKPGSSVKVSCKASGHDFHLWYIHWVRQAPGQGLEWMGRVSAGSGNVKY

SEQ ID NO: 3894 - protein, 119 aa, synthetic construct; identical to SEQ ID NO: 148

SEQ ID NO: 3895 - protein, 112 aa, synthetic construct
DVVMTQTPLSLPVTLGQPASISCRSSQSLVYREGNTYLSWFQQRPGQSPRRLIYKVSNWQSGVPDRFSGSGSGTDFTLKISRVEAEDVGVYYCMQGTHWPPTFGCGTKVEIK

SEQ ID NO: 3896 - protein, 116 aa, synthetic construct
EVQLVQSGAEVKKPGESLKISCKGSGYSFTSYWIGWVRQMPGKGLEWMGIIYPGDSDTRYSPSFQGQVTISADKSISTAYLQWSSLKASDTAMYYCARNGYLGDYWGQGTLVTVSS

SEQ ID NO: 3897 - protein, 120 aa, synthetic construct
QVQLQQSGGGLVQPGGSLKLSCAASGIDFSRYWMSWVRRAPGKGLEWIGEINPDSSTINYAPSLKDKFIISRDNAKNTLYLQMSKVRSEDTALYYCASLYYDYGDAMDYWGQGTSVTVSS

SEQ ID NO: 3898 - protein, 108 aa, synthetic construct
DIVMTQSQRFMTTSVGDRVSVTCKASQSVDSNVAWYQQKPRQSPKALIFSASLRFSGVPARFTGSGSGTDFTLTISNLQSEDLAEYFCQQYNNYPLTFGAGTKLELKR

SEQ ID NO: 3899 - protein, 123 aa, synthetic construct
EVQLVESGGGLVKPGGSLRLSCAASGFTFGDYALSWFRQAPGKGLEWVGVSRSKAYGGTTDYAASVKGRFTISRDDSKSTAYLQMNSLKTEDTAVYYCASSGYSSGWTPFDYWGQGTLVTVSS

SEQ ID NO: 3900 - protein, 111 aa, synthetic construct
QSVLTQPPSASGTPGQRVTISCSGSSSNIGSNTVNWYQQLPGTAPKLLIFNYHQRPSGVPDRFSGSKSGSSASLAISGLQSEDEADYYCAAWDDSLNGWVFGGGTKLTVLG